United States Patent Application Publication US 2026/0058010 A1 - sequence listing, part 34

SEQ ID NO: 410 - DNA, 1700917 bp, Homo sapiens
  source 1..1700917: mol_type = genomic DNA
cagatgccactttagtccaccaagcttgccttgatatcccccacctccaaatcacaattaatcacttgcttatcgacaatcccatagagcttcctttacattgctctcatgattattttccctttgctttatagaaacacatttctgtcctcctccaatgcttagtggagtccttggggttcagaccttgatagattcattttgtttctcatgagcatgatgccgggtacatgtgctattaaagtttgctgggtcaggaaagtgctaggatgctgcaagaacatccagtaaagggcagaaatataagaactaccatccttggctggaggcaatagagtactgtggctaacaggcaggctctggagtgggatagacttgagttcaaattcattcttagcagcttccagctgtgtaaccttgggcaccctctctaaagcttcaacttttaagactgtggaatggatctcaactgtcaaatagcacaaacctcactggactgaatgagatgacccacgtagtggcatatggtaagtgctcaacagctattagtggattggtgctggtccaagggaggacatgccagtgcagcccttaaaaagggagctggagaagaaaggagtttggggctgcattttcacataaggtgccagggcctgatgctgagcaaaacctttgtattgggtgccaccgactgtcatctcttgtttaggtttgactggggaaacgtttccacagacatgaactagtttgtcaaggctggcaagggattttcaagggtttaggggtgcagtctaggctcagagctcagagtgcaagccacaaaagagagccatcttcctgagtcaccaaaacacttgattcgggcctctgacccttagctggcagccccttaggataggatgggctgtgcctgggtctgtctttgctgctaggggctctgagagaggaagccccatttgtcactttcatttctatgtccccagccccttgcagtatgcttcatcctaagcaggcattcaaagtgcttgttgaaggaatagatttgtgtcctagttacagccctgacttccactagatgctcaaagattgccctgattttgcaaggaagagcaactactcagggaaactgaggcacacttgtaggttagagtccctcagtctgcaaggagacacacacatcctcagcagtggggaagtggtttggttactgaagctgtaaataagaattttgtctttatattaattcctactctgattctagggaagaactctcctctcaggctggagtaaggggagaactgagctcagacactgcctcttagttgtgggggctgcaaactgcccctccctcatgatatcttctcagctgtttgcaaaacagtcagggaggaggtgaagccctgagccaggcggcctgtctgtctctttaaatgctggggtctgtgtgggagagggaggggccggctctggagtgcgtgaaattcctgggctcctccagcagtctcaggctcagcgctcagccctacacatcgcctcttgcatgcaactcacagagagggagaggcaacctgtcctcccctctctcagcctcggcatctccagccaccaaggacctgcttttcgcacctccaacaacccctcccttctaccctgccactccctcccagagagaaaggaaaaggagagagaaagattctggaatttgaacctacccaaagaggaaacatacccagcaaactcagttgattaaacatcaaacagacatacagacagatcccaaatcttctgttcaactggaaaggtaaggtttgcggggaaaggaaggcagtcagggcatgaaacaactcaaggttcttgtccgttctgggaagaggttgctcctgagagggtagaagttttcagttgggagcaaccaacctagattttcttttttgaatactgtatccatgagccttggctgactgtggaaatggcttttcaactgcctttcttttccttcagtttctcctggaagttgggtccttttcctccagatgttggaaaagtcagagaatgttttagatttttatcttcttcttctttttttttttttttttttgagtctttctcctatttgcttgaattgttagtctgaaatgatgtgtgctcatcacttcattttgggcagatactttttttttgacattttgtagtcacttcccccctcatttattcatttatttatttgggctggttaaaatgagaaacagaaaggacactctgaggatcacaagaaaacaaaattgaattgagacagggatttccctagctgttgaggaattgacgtgtatgtgagtgtgtgtgtgctttttttttttttttttgagggggtgtgaggaggtggtcctagagtctaaaaattcaggttggactcctgtcttgtgaaggtgggcatacttggagaaggtgaaaagggagtgtgtgtgtgagtgtgtgtgtgtgtgtgtgcgcgggtgtgtgctcctgtttggatcggttacaagggaatcttcctccactgccttccatttgtttatattaatgatttagtagcaggcttgcctgaaaacttccactctgtgtaagcactgtgggttttgcaagctctcagtgaccttaaagcctggttcgatgtattgttttttccaggcattgtgctgtacccagagtttcagctctttccctctctcttttttaaccacaaaacttaactgctttagaaacatcatcctgatgacaaggaaaaaaatgtgtccccccaccccccatcccttcttaggccagtgatgtaataccaacctaagggctcggctgctttgcaggtgacttaccctgtgattacttgttaaaaaaaaataaaattttcccttcctccattaaatgtctgcctcttttaatttggatgtagaaatatcatcatgcaatgagaacatcatatttttgctaaccattattggggtttaggtaaagtaggattgctcttctctgatctttattgttaatacttttttttttaatgcaaaggtcagagatcattgagagctagcttaggatggagcaagatagagtcagggcaaataaaagagctggtaggacaagagctgtcttctccccgcttccttcggttcccgctttggggagatagtttttcttttaccactacaagccaccccaacattcttctttcttcctctccgctgggtcctgtggatggccctgggagggagagggggcactccttgtcacacctggaggatggtgtaattttgggggtcagatgaccgtttgcctttgtgatgaaggttccagtggaaatttgaactcccagcacgctgcgtgacttggtacccaggatagtctatctgggggcacctggaggttagtctggggaggctggagaactggctctttattaatttgccgttctgggtagagccttccttcatcgttcaagggcttctgcatcgcctttcaagttaaaatggtcccgctggttatgatgggcaagtttacctaagggctactgggtatgtggcggaaggatggaggggagtgagaggaggcaaggctggtatttattttttaatcttcgggcttaatctgcctaagtcatatggggcaaacgatatttcagacgggtgctggttgtgcagatattcctattgtttgattttttgttgttgttggggagtggagtaagggctcttggcccattttctgcagcctgaggttcatcctgcgagtcagtcttccttctggaagggggggaaaaggctggacactggaagttcgctattaaagtgagcaacagggctgggtttattttttaaaaacaaccggactgtgcgaatgcccttttctggagctttctggccctttctagtgaaataataatttaaaaaaaattgcttcttgagaagaggagggggcagaaattaaagggattctagattttgagagacagctacgtctttgcttctctggtagttccctattattaattattggggttttgacggcgttctggcctccgtttttgttgatttcattttagtgctgcgtttctcctgactatgttgatgatttgctgcttatataagggaaaggatgtattgaggtggactgatgcttggggttttgagatcggctactgagattgggtggcggttggtgtgtttgtcgatgtgcatggtaggaaggtcttttcttttgggtggtaggggatgagagaatggtgggagaacggtagatgagatgctacagcaaacggggatgtggggggagacggaggtgaggttggaagtcaccggtttgcagaatttctattctgcacccccctttctctcgctcctggaaaaaaaatccattatctataaaaacacattattcttcaattggccttttagagaaaaaaaagagagagggaagggaggggttaatttggtgagggggcttggtcgtaattagcccactgctgcaaaactgagatacagaaatccatcggcaccagctttgggggcatggagaggcagcggagagatgggggacgggttgtcagtcttggatgaacagtggagcggtcgggttggcgtctgggcattgtgtgtgcttgtgtctctgtgtgtgtgtgaaattttttcatcccaccaccaatctccccctccatcctcccccaattctgccatgatcttgccttctatttccacacactgctccccccaccctaggcgcacccccccttcctccagccctttccatcttcatgaaaaaaattctgattttgatggctctgcggctcttttttccctttttccttgctttttttttttttttgcaacacaacagtcgtgcgatggcctttcctacatgccacacggatgcagccttctgataggagggcaaagtcggcacatccacacacacactggcatacgctcttgcacacacagtctctgtcacatacacaggcgccaagggcttcattttgcttggtttcattccccttaacctctttccccactctacctccaccatggctccttccccccatctttgcatggggactgcggtcacgttagagcctcttttcctctccgcaaccgcggtcttctttcttctcgccattattctttccctaaagctgtcgtgtgtcgcagttcatgggattagcatgttggagagtctttgtgggaggggacctcacaagcaggggattggaatgggggtagataacattaataattttttttgaccaaataagcacccagtgataatgatccaatttaaccatccatgaaatatatgtttgcggtacattggaggaaggttatgtgggggaggcagagtctgacggggttacctccggggagatttgatgcctggacagtagagccacagccccctcccccatacacatgtgtacactctctcacacacaccaacacgcacagctctgatcagtgggctgtgtcgaaccagagggcactgcagaatatcccagagagttgtgatggttagttgggaggatggaacaatgtctttgtccgacccagttctcctctctacagatgattctgggtcttgaaattcttggtggcctttgtgttggtttacgggtggggactggaagggtgtttgtgttttgtcaagcaccagcgtgcctccaattggacaacataggattgtcaacactgtgcgtgtggttcaagcaggaggctgcctgcctctttgtgtggtgtggctgtgtttgttggatatgtgcgtatccagcctcatacggtggctctggacaggtgtggtagtgacggggaaggaaggcaagaagcagggatggtcagtggggaagagtcctcaaggtagttgagaggagggtagaggggaagaaactgctcctgcctccagcaggaagcctcaaatgagatccccacgtccaccaagcgaacccgtgggtgggtggctcatggatgactggtgggcggatacagattgaagggggagaaggggatgaggtgggtgaaattgagggttttccctgctgccttgacagagcctggggctgagctcgggagggtggtcttgctcccctggcatcagccacctcttgggcggctcggccttgttggaggctgcagcctgaaggagctgaaatcaccctcggccgtgagagcagcccagcccctgttttctcctgggctctggctgccttaactaccggacgccattttcccatcttcagctgaaggtgtgtctctctttattagtaattataagtgaaattggaaaacattttgcctaaaagaaaaaaatcacaaaatcctcagagcaaaatgctgatggtcttacctttctagcatccctctcccttcttggggctgaccctgaggagttagggagacagggttacgtcattgccagagaaaggggataaatggggagtaggatgccttgggggtaaattattgtgcccaatgcagagaagagattgttcttggtatcccccggccgtgttctccttacatgacccctcaggtgtggataggagacttgcaaaagaagaagcattccttctaaaacctcactgcctagaaatgtgctggcccgtggtcggctgtggtctgggacctgctgtggtccggttcctgctgtggtccggttcctgctgtggtccgggacctgctgggggaagaactgttgcgctgcagctctgagccttgagggccagctctgttgctctgaggatgaagcaagtgcggtgctgtggctgggccagccacaggtggccatgctgggctcggggcaggttggccatgctgagctcggggcagggactatggatggggcccactcccagccctttcctgcaggttgttcctcaaattatactcctcagagagacctttcctgaccagctttctaaaatagtccccttaccccaacctcctggctgctttccagcccatgacactgtctttaattttaatcggtgaatcattatttaatattatattatacgatgatatattgaaacatttaagatggatctcgtctctttacccctctagaatgcaagctctgagaggtcaaggactttgtgttcattgtggtgttcctagtgcgtaggacatttcctgacacgtagtaggtgctcaacaaatgtttgtcgattggaggaaagaaccacatgggtttagtgttggagttttcttctctagcacttgtggcctgtcttctgggaagggtggactttgcctctggttgtcttagccctgcctgaatgtctagatctgctggaggaattgcaacatgctcaacttcagtagtttagtagaaagggcttctctatccctggctcagatgactctgcctcctttgagatccctctaatattagtaatcaccattctcatcatcatcatagtagtggtagtaatagtcgtgatatagctatcatttctgcagtagttactatttacaaagttctcttccaagtttttttttttttttttttaacactcggtatctcatttaattctccaaacaactcaatgcagtatactattattacctgaggagactgagacttaaagttacctaataaaatgacagatcgaggatttgaattcagatctgtctcatgccagagcccaagcatgggacccttatgttatagtgttagaggaaaaagggagatgaatcatctgtcatcttattcagtgccctcaagtacaaatgacaagatggaggcccagagagactacatggcttttccaaagttatgcaccacgtttgatgcagagacaaaactagaatcaaggtttcctggctgccagggtagggctctttctactccatcatgctgcctggtgggctgtgggcccttttccaagggtattgcagctgctgctgtgggggctgcctggggtgccttcttagttctctttcttcagaggggagtgaggtcttggtggggcaggtgggtggtaggtgtgtctctaaggaaggcacacttgcagagctagaggtcagggtttcatggctcgaagaagactggtgggctatattccagctgagtggtggttaaggttgtcttctgaccttcctgggggaggagaaactggaatggaggaggacccccattccagtggggtgctcaaggttctcaatcccatatagccctgcccgtcaagggtactttcaggtccagcagaggctccattcagagagccaagcagctggtatctggatgctgacgactctgggagcctgtcacttctcctagactggcctagccttctttctcacgaagggaagcatgaatccagacattggccccagtgtgcttcatttgtgtttccagaggctggttggggggcatgatgtcatacaatatgggtgaaggccttctaccagtgtctctgttccactctagggttggtcttgaccttgaatgggagaaggattagacattctagacaagtatgaatgtgtgttttttttttcaggggtggggtggggccagagaaaattggattctgagaagcaaggaagtcttacctttagccaagaccttgaagcagagcatgaatgcatttctgcatgaccttgagatggtgtagccagacgccctggtgtggggagacagtgtctgtttaggcctttgtcctagtgtaattagtaactctcaaaagtgtcccggtttggatgataaaatatatggccatccttctttaagacgacatcacacactttctcttaaaggaatagagagaggaagggggcatactagagagagaaatccaattttagggcaggaaggtgactgagagtacagcctttccccagctctactttcacttacccccactttctgaaggataaaaacctggatcttctgagtattcctactaccaacatgactactacttctctctcaactactcttactcccatccaagaactaaccaggccagaccctgcttagcttccgagatcagatgagatcgggcatgttcagggtggtatggctgtaaacccaactacttttactaaagcttcgattggccaatatttgagacctgactatgggccagatactatgctaagcacttgacatgcattatctcacataatcctccaacaatcctgtgaggtgggtactgttatcatctctgtcttacaaatgaagtaactgaagcctaaggaggttaagtaacatgtccaaggccactcaggtaggaagtgatgacatcatgattcaaacccaaagggcctggctctgctctgaagcctctggtcttaaccactgtttcgtaccacctccatgggcctgtcctctggttccgcaagtctggaaacttgattctaagagctggcccatttgccaggcagtcagctgactcacagctctgggacttgctgaaggtgctgctgtcagttagaggcatttcaggcttaggaggagggggctgctggttgtagcactgctgcttaggagtaatgctgctggttgtcttttgcatggcactaaggaaactctgtttcccaaggtgtccccgttaccttcttccttgcttcatgcaccttgtctgaggagggagttgaggtgatttggggtggtgataggtgggcagaaggtagagaacctgaagcctatttgtctctgctttgctgtgtcgccctaaacctgcatgggacagccacactccccatggcccttgcagcagggactggccctcagcgtgagatttcagtgaaaggacaattatccagcacctgctttgagcagggcatcatgctctgctatttttcacttaggtgggtagtgtcctcatttatctgttgaggaaactggtgatcagaggggttaaatcgcttttttaggattacacagtgagatcctgggtccacacttgggtctgaatccagggactctgcaccaccctccatcctgaatcatggagaagaggagctgggaattggatcatctaaaactgggggtaaaagaggaaatactctagacagaggtcttccaatcagctcctgaggtctggataggaactctggggatcatcatccttatcagccacctctaggcctgcctctaccccacacccacaggggaagacacctgctgacccctgagctggaggggtgctggttctggcctggagagaaggaggagatgggatcatgcacagcctcactggtggaggcgggatgttcagaaggagttacctccttcccccgtggagcaggaacatgtgcactgacaacatccccctacatctgtgtcacaggataaagggtgggaagggatgccaggtctgctgcctagatacaggcagggaggatgcacagagggaatgagcgggatcccccaggctggaggactccagggaggaagaaggaactttttcttggtggagaggcagggaataggagaagaacagttttctgactgagaggatggtctgcagcccctaggctgagctgcatcagcttcattgcagtcccattgaagactgtgtttattttttccaataatgtgttaattaaacatcgatttctgggtggaggaaagggaattggattgccagagctaaatggagtgtggcaaatggggagcggttgagaggggccccaagctggagtcagcattctccagtggcaccccaggagggtcggaagggaactagggctgcctcttcccctggctccaaatttggaattgtcaactctcccagagccttcaggaggcacctttcctacttcttgggtgccagggcaggtggagagggctctttgctgaaccccagttcaaggagggaggaacaattattctccaccttcctcagcatctttggtttatagagactgtgtacccagtctcgtgttcagcatgtgacatatatttgttctttgtttttttttttttgtttgtttctgtttttttgtttttttttttttcttgttttagacagaatcctgctcttgttacccaggttggagtgcagtggcttgatcttggctcactgcaatctttgcctcctgggttcaagggattctcctgcctcagcctcccaagaagctgggattacaggcatgtgccacgacatccagctaatttttttgcatttttagtagagacaggggttcaccatgttggccaggttggtctcgaactcctgacctaaggtgatccacctacctcggcctcccaaagttctgggattataggcatgagccactgcacctggcttggtttttaaaataaacatgggggagggcgcttttatattcctactttggagatgtggaaactaaggcttagagaagtaacaagttcaaggtcaaagagttggcaaggtttcacaagaaaaggagtcctagcggagttgaaaatatctgaggttggaagaacagccacctagagtcccaagcccctttaaagggaaaaaaagaaaaaaaatgaagcatccagtagtaacaaaaagaaccatttgatattttctcattggctaagattggctgagctgccgctgcattaagttaagtgctttgcatatgaagttgggaggattcagtgaataagtgttaggcaatcattctcgttgtacaggtgaggaaagtggagcttggggaggttaactatcttgcctgtggccgcagagttggtaaatggtggagctggaataaatttctgtaaaaaggatgttgagacctctacagctgtgttctattgtcccatatacactgaggacatagacactggctcaggaagtctcccatgacttttaggaaataaagatgtggaggtctcaggatggaccctctggctagatcctgggccccataaatcccagggtcttgcagtgtggactctatcatcccttcctttctcagcccagggcaactcaggcccagcctctggtggagaaaagcctgttttggggtgtttgtggtggttggagctgggtgatgagtataagttcaagctgtagttctcaaacttgctgcatattgaaatcaccatattaaaattccaaacccatgctgcacctcacaccaactaaattagactctttagggacaagagcctgtcctcggtgtattttaaagcttccaggtgatcccaccaggcttgctaactgatagtttggaacagcctctcctgcaaagcaggtgttgggaggctggcatctcttccagagttaggtaagtgtggaggtaattggtcacacacatgtaatatccagtggggcaatgtttatagtgtattgatcagtttttttctcattagaataacagctttcagacttcgatatgcccgaaatgcctagggagtttttacaaaacgggtgtctgcaggccccacctatagacctaacttaaaagttctgaggtggggcccaggaatctgcatgataagcaagcatcttctgtggccaggtgaggtggagatctctaggggtagccccgggtctcctttgttccatgcacttgtgaagtcctctttccttggaagggagtgcaggctgaggacatgggttgccatggtcacctgttgctctgtgaggtttggtctcctttgctcaggcctggctatccattgctgacaaagaaagctggtttgcctggcctgggtccctgctgcccactgcagtgactcttgcttagtgccttgtgtgtgggcagccctcagggaggaggggatgatcccaacttagaaattcggcagactgccttctcagtttaaaaaaaaaatcagagtaaatctccgcacaacttgagtgttcaggagcctgtcagcagcaaccatcctgagtcttccccctgggattggtgaaacagctactttggggctcattttaaatttttcttctaaagctgtcacagaatagagaatagtcggagactctcagagctggaagggacctgggtgatcactgtgccaatgctaatattctattcactttttcattcatttgttcatccagcagatatttattaaacacctattatatgcaggcactataccaggtgctgggaatacagccaccatcaagagagacgtttagtttatccctgatggaatttaagcttaggtggaagggcaagcggtagacaacacaagtatgtctataattacacattatgatgagtgttctgaaggcaaagtattggggggcactgagaattagagagacctaatttagaatgatggggccgggggggacaatgatagctaaaattcgttgagcactcaccgtctgcaggccctgctgcaagggcttcacaagtatcacctcatttaattttcacaatgggtcttggagaagagctaatgttattattgttgccttgttacggaagagggaactgatacatggaaaggtgcccagtctggaactaaaaccaaagcttgtaaggctctcctacacttaacatcccaccgagatgtttttgctgagaactgaaggacagatgggggtcagaaaaaacagagaaattaggaaagtactgataatcctggccacgtgtggagctcttagatgctaggcactgtgcaaaacactttatcaaaattatctgttttttgagatggagtttcgctcctgttgcccaggctggaatgcaatggcgcgatcttggctcaccgcaacctctgcctgccgggttcaagcgattctcctgcctcagcctcccgagtagctgggattacaggcagtgccaccaagcccagctgatttttttgtagttttagtagagacggggttgctccatgttagtcaggctggtctcgaactcccaacctcagatgatccacctgcctcggcctcccaaagtgctgggattacaagtgtgagccactgcgcctggcctatcaaaattatctcaccacatcctttcagcagctaggataagtaggaattcttatccctttttttgcaggtgagaaaaaaaaagtttttgggaggttcagtgactttcgataggaagcagctgggtgtggcagagctgagtctggagccagggcctcttgtctctgggcttctgtctgtgcgatggcacagttcccaggcggcggacatctctgcatcctgcctggacatcacctgctgggtaatgctaacaatggcaggttgggaggcaaggaggatcccccacagtccattggcctcttgttctgggcctgggagaacccagaataaggatgaaacaagggacgtctttagggcatgccggcccctctgtgctgaaaggaagctccatttttcttccttctggcaagaaccatcaggccagccctcttcctggtctgctggccctggaaaccctagtaaatgactttttcaggtaataccctccattgccttttttctctcctcttccctttcatccctagttgctaattagtgagatgcttgttacttgcagttttgtgtcccaccctctgcgtggtgcctactggaacactgtccctgcctgctcacccaagttgtgtggtcccctggcccaactgagctgaccagtagatgtgagtgtaggtaggaagaagtacagggacttagttatgaattctgtctagagccaggagaaggaggcaagaaggtgaagaaagagaaaggagatgtgtcaatggggcatgataaaatattaaattcctgaaaggtttgccaggatgtggagttcatttctttcatatccattcccagtcctgcaggtgagtgagtctgcacatggggacaagtgccccgtgagatagaggttcctctatgttctgactgaaatctcttctggggttgaagggctggttctggcaaggggagaagctagaagtgggcaggctggctttctgtctgtttttcttcaggtcttggggtaaagggagctccctccatactgggctctgattctgatgagactaacatttgaaagcaatagcttgactctacagatttctgaaatcaagatagaaaagggaaggtggggaagctttctccaagaaggggcggatgtgtgggaagtaagaaggttgcctcgtgtgtgggttgtagagtttggatgacagtcacttttttctttttttgtacatgtagttatttatttattttacaacaattaactccttacaaatgtgagttgatgattttcttattacaaaataatatatgtttgttatagaacattaagaaaacaccaaaaacaaaaataagtcacctataaatctccccgccagagataaccaatgggagaattttgatatctatcattccagcttaatttctaagcatctgcaatccagggtgtgttattttgtttttagaggagttcattcactcatttaacaagtactaattgagcgcccgctcgatgccaggcactggaatcacattttggaagctgtcacactagcctgatttttcacataaagatgcatcacgaacacttttccacaacagccactcatgtctttgagcttccagatttagcttttgggtgtaatgaggcagttggcaaattttggcatctcaagtcttatgtcttaagagggaaggaaacactgcagggcttctctctctttggcgtctatggcagtaccatattagactcctagggagaaaatgtgtctttttactcagaaaataagaaagggagagaagctgttttagacagtgggaaagactctaaccttttatttaatattggcatctggcatttctccaaatgagaggtttagagagggaaggttccattttcctcacagaatcttgactccttagagagtgcatagaaatgtaaagcctatggctagctcacctccagcgtagagatgaggaccaggagtggctagatgacttgtccagggacacacatgtggttgacagcagagccgtgtctggagcctggggagctgaactagggagttgcgcaagtagttggggcagatttggtaaaaagtggtccagcccttgctgggtggatggaggaaccctgctggtgttgctcgagtttggatgctgtgcttaaaggaggtttatgatacagatttgatttcttcatctctgagatgtacatctggggctgtatagaggactgaggagtgagagagaagaagggaatgccttctgcaaagccactgctatacacggaccaagctggttgagctggcactgtgtgggcttccacaaattcaattctgcaagtatctattggacacttcctttgcccagggcattgcatttagtgctaggaatacagagaagagtaatggttgacattctttagtggaggatgatatgaatgtacctaatcactgcaggaggcctcgatctattataggatagagggaacccaggggtttcgatggagggagtaatgacctcctgccagtgaagggagtgtgaagaagtcttccccaaggaggtggaatttaaagaatatcagcagatgtggagagaaggactaaggatgacaggccagggaagtagcatgatgaaaggaaagaaatggagagattcctccaaatacacaggggatcaaaatttccagcacatgggtggagggctgagtaagaaatggggctgaaagggtatgctgagtcagggttctgaagaacctggaatggtaggagattcagttaggatgatccctattataagaatcctaacttaatctgaatccattgaggaatttgtaggggatggggttcacatgagtaaaatttcaggtgatggacctcagctttgggtcagttaggggtgcctgatataatctcagcctaggctggctctgctcatgggagtgaagtggtctgcagcttgagagctcacaccagcacacctcacaatgaagatctggagagaatgacttgtccaccagccactgaacaaaattctcaggctttattttggttggaccaacatggatcaaatatctgtctttggaccaatcacaatgggatgctcctgtagctagaccatgggtggggactagagtggacttggggagatgcaagagagtgaacacaagcatttggactttagtctgtgtgtccttggagcatggtatgtattggtgcatggggtggcttgttcatctttgtggtaatagaactccaggggtggtaatgtccctggatttggcagaatcagggacaggaaggacactgcctggctgacactggctctactgtctcagcagaagccactaagctgggccatagagccaattctagaatctagtccatggaggtacatttgacacatcttggcattgggcaggaaggaggagaggcagagtgaaagggtgacagtaaaggacccagccagtcttcgttggtcaatgttgttctcctatggttttcatcactcttcagagaaaagaggctaagaatcttttaggggatcctgagggttggtgctttctgcaaaatacctctaaaaggccttgtggcttcccaggcagagcctgaggtgcaggaacctgagttcatgctttatggatttgagtcttttattctttttgcagcgtgtacatgcatagctcctctaggattggctttgattgatagttgcctttgcaacattaccatttcctcagggatctgatgtcttcagaatcgctgcgctggtttccatttgtatttagtgggccctcactgggtggttatgcgctctggactatgtttggagaattaatttgctttatgcctcaaagtcaataggacgctttttgtttctgctccttgaaatggacgtagaagcctttttaatagggggtcctctccctgagctggcaaaagagggcttttctgacttggtgattttcctcctgtgtgtggatctgttggggtggctgaaaactaagctgcagtaggggagataaaagggacaggatagtggtgggaacatgatgctccctgatttcagatggtcacactgctctagctggcttttgggagagccctagacttggaagaaaggggatgctggcaaaaaagctttgattatcagctttgtcattcctaagccatatgaccctaaacacttggcttttaaatttcagaaaacagtcatggaatacctgcatgccaggactatcttggacatgtgcatgcttcttttttttgaagtagccctaaggtgacagtgagcatgacgctcggagttatcaaggggctactttgtgcatggattgtgcccaagcttttcgtgtgctgttcagatcgtcatgaagccccatgaggcaggtattagtgtcttcactttacaaatgacaaaaacagaggctctgacaggttaagtaatttgcccaagatctcttagcaagtatgtgaggtgtaaatctgagagatgttttggtggtgtgtgtgtgtttttttttttttttcctcaaagcttgcaatgctctgggtttcaagatgtggagggaaaagcatgagctttggggtcactcatgcagacttgggtaggtaactccctgctttttgtttactagttgagtgattacctcctgagtctacatgccattcagaggtaataccatcatctttgtagttggggatggcttagaatcaagtgacatgtgcaaggtcatctaatctagtagttggtgcagccaggattggtacccacatggtctgatgttagaatccacactcaacacttcacatcactctggttctggtatataggagctgtggccacagtaataacgatggccaaattctgctaataggaagtcttcgcttctggtgatggatggagcaggcatggagattttcttttcatttttctctttccttcctaataacctctaccaggattttcttggaagtaggagctgaagaagtgagagtcggggctaactgaactattaggattttagttgtttttttttttttttttgaggttgggtggggatgtgggataggttgaggcaggaggtacgagaactcatcagatagctgagtggaatatgctagaagctttcatgtgtactgtggaggaaggggagtccctatgtagagttgggaaatttgagctctaattacaacttcactaccaattcactgtatgctctttaacttttctaaaatgagtattcggtaaattaacacatagggagcactcgggccatgtgactgtcctccacatactcctgcacagctaatattgtcaccctggctttagagatggagaaacaggatggattaaatggctcatggctccccagctagtaagtgttacatccgggaccaaaaacaggactgcaggattcaaggtttttcccctataggatacttgtgtttagaaaaagattgtagtctaactccttttccaccccatgacagttggggaaactgaggcttagaggtcaagtgatttgatcaagatcccacagtgtgaggagccatctgagatcaaggtcatgggatctccaggtcaaggttacctcccacctggagcgcagatgtgattccagggagggaactggaaagactgatagggcattagggatacagtactgtgtttagagcctgatttctggctcattggaagactggggggcaaatcaggaaaccaaggcagaagcctatgtgcaaggctagacaaccactttggggtcagatgccatggaaaattgggcaacaaggacaattgcagatcttgtaagtaggtggagctctgcctacagatgggggaaggtatgggctgctatgttcattgagttcttggcagtgtggttattataatttggatttcttaaggcctaagacatagactttggaatcagagcagccaaatgtgaatgcaggtgagttctgtgtgtgcaaacttgggcaagtaatttcccttctcagagtctcagatttgtcatttacaaaataggaatggcgtcatacctaccctacggattcctacgggttggttgggaatattgaggagttatcagtaaattatctactttagtgctctcagaatgatgtctggcctggacctctcgccagactcactttgtgtatgcatctgcttgatcaccatctctacttgtgtgtctaattctaattcaaataaaatctttcttgctttaacatcttttgattttacctcctgccccaatctgctcctcccagacttctctattttagaaataggcaactccacccacctagttgctcagacctaacagacttagaacagttttcaactcctttcttgctctcacatcccacatccaatctaccagcgaatcctgtcagctctgccttaaaaatggacctggaatatgactatacttcttacctctgtggtccaagccgcccccaccaccacttgcctagatgtctgcagtgacctccttactgtgctcctgctcccactcttgactctgtgcatttgtttctccactcagcaggctggagtgatcctttaataagtaggtcagatcatgttattctgctcaaaaccctctgctggcctcctgttccactctgagtaagccccaaggtcttcacaaccacctgcagtgtcccctgggcctggccctggcacccagcaccttcctgcccttctgcctcctcttccattcttttgcctcttctgactcagccatgctggcctccttgatgccacttaaactctctgatcccagtcccacctccaagcctttgtcccggcaattttccgggccatttttttttttccttttttgagatggagtcttgttctgtcgcccaggctggagtgcagtggtgcaatctcggctcactgcaacctccacttccgggtttgagcaattctcctgcctcagcttcccaagtagctgggactacaggcatgcgccaccacacctagataatttttgtatttttagtagagatgggatttcaccatgttggtgaggctggtctcaaactcctgacttcaggtgatccatcctggccatttcatgttcccaggtctgtgcatagatgagcctcattgtggaagtctcccccaactaccctttccacaacagcactttcctcccctagcactctggccgtccttaccgtacttcgtattcatagcccttgccaccatctgacgtgttacacatgtgtttattttgcttatcacttgtctcatctgaatagggtctcatcaccctgaaggctggttggggctttaactggttcacaaacagcaccttgtacatggtgagcactcagtgaacacctgctgaatgaacaaatacctttccttccctcttccacaattgaggcacattgttacattgggccacttcttgcctagtccttgagggccaaatgagaatgtctcaccctcctatcctcagttccctttcaggaactaccttccacagacaaagcctggaactttctcattttgaacaggaatacctgtgccatgtgcattgcaaaataacaacacaaactagaaaacaacaaaattcagaaaacagagaaattcatagaaaagaaaatgaagatcacctggaattccacctcccagaaagaaccactgtgacagccgatgcccatctttcaggctttcctctaagtcacagatttcttctcgggagaggattgggaagaacattatacaaatgagcatatcattgaggaagctggtgacagaatgacaatgacaaccagcagtgttgtctgataatggtgggactgggaattggaagaatgcagcttgtgtcagtaacatttatttatttatttatttatttatttatttatttatttatttacttacttacttacttaattacttacttacttgcttacttactgagtctcactctgttgcccaggctggagtgcagtggtgcgatcttggctcactgcaacctctgcctcccgggttcaggtgattctcgtgcctcagcctcccgagtagctgggattacaggtgcccaccaccacacctggctaatttttgtatttttagtagagatggggtttcaccatgttggccaggctagtctcggatgcctggcctcaagtgatccacctaccttagcctcccaaagtgctgggattacaggcatgagctgctgcccccacccagtgactctcttttatatatgaaaggaaatcgatttgtttctaaccaggtaagcgtcctacataagggaagacaatgaaatttcctcagaaaagtacaaggaaaattcattttcccttatttttcaaagcatctgcttggatagagctgtaaaaccagaagaactgtgtgtttcattacaagcaaattcacaactggtggggtgtggggctgggccagggggatgaccattggtgaaggactaacttacatgtttcagaagctttacacatggtagttaactcattgccttctcatggtgatcttgtgaggtggacttcatgggttgcattttacagacagagcatggtggctgagagaggttttatggcttccctcggtatacccctttacaagtgtgatttgaacctagactgactccagagcctgtatttgtgactgtgatgaaacatgcttcagagcagtcagaacggagggacagacgggccaacatggaagtgcatttgatgaggctgtgggaggaggctgagaccttcccagggaggacccctgcaggcattggcctccgctgcaatagtccctttcccatagctccccaccctgatctagagttgcttggctgtgtggccagatagactgggaaagcctggtttcatctctttggcttggaagtttccttccagacatgtctagggctggtgtgatggaggtgggaatgtgggagtggtgccaccagtgtgactgaatgaggaaaatcttgagatggaaatgatgggggaaccaagcagacccctaggtcactctttagctcagggcctcttgtggcaagtaccaccatgccgatgggtcagagttccagaaactgggatgagcaggggatattaaatcatcccttcccctctttgagctgtgtgccaactcctgggtatctggccctggtgagggggggagggtggtctgttgcactcattgagatcatgccagctgggccagtggactgaggtacaaaatcctggtattcctgtgtggggctgccacgaggcccctttggagagatctgagctatatccctgccccctttggctgcccgaaagtgtgtgtgtgtgtgtgtgtgtgtgtgtgtgtgtgtgtgtgtgagagagagagcatacatgtgtgcaagtgtgtaagtgcagggtgtgtgttgtcaggatattgttacactgcctaagggcaggagatggctcctggctattaatactgctcagatgttaaactgatacgggcactcagatcttatccatagagtgaggagatgcctgtggtgtcattgtcactcctgaattttgaaacctgtctgggaaggaggcagagagggactcaactcaggtagtggtacagggcttggggtggggtgcttatttatgctttagctggataggagatactgaactcaccattgctctgcaaaaatagcctctctccgttctgtttctcagagaaaaagaagacttcttggatttcattcaattcaacaaatctttattgagtacctgctgggttcagacagtgtaataggtgctggagatggagtaggggtagcagttgtgggtgacagctggcagagtcaagacatattttggtgatactctctgagcagagttgatgatggattggatatgaggatgagggagagatcagtgtgaagaaggactccctgggtgttgatgtgaggagccatcagacgcttggcaccgaaattcctctcctagagagggtggtgtggctccagaatgctggggcagacttcaacgcaaaaactgcacaaagagggcaggggtaggagaggccctgggaggtgttagccactgagcttgaaccttcgcatttttctctttcttaaaagaagttaccattaaccagtactttcaatttcttctcaacctacccaacgccttctaccttcctgataccccacctctaatggaatatggggagaagaaattgacttatttacaatatttagcaagctgagagaaagtttagaaagcctgtttggcttgggaccccagaaggcaaagaggtccaggttcaattctgagatagtggatattattgttgcggacaactccttaaggttcttgggtagagctttaaggccatgagaactgcatgattcagtgcaagcaaattcataactaggggggtttggggctgggccagtggataaacttttctttcaaacaattatggaagattagtgctaaattaaactttggagcttgtctcatttaacccctcattctggaaatacttgaactgaggctcagagaggtttaggattgcataaagtcacacagcaggttggtatggcttggcatccagatgcgattttgcttaaataactgtaagtttgggtaggggagcctggaaaagcatcacatgaaaggcttttaaagagtcagggcagtgttaggaaacacaggctagccagggagtctgctggagggtaagggcctatgtcttacaaacagaattggctccttttactaagaaacttgaatatcaagcacaaatggactgaagaggccaaagttaggtgtgattcaagaccagccgggacaacatggtgaaaccccatctctactaaaaatacaaaaattagctggatgtggtggcgcacacctgtaactccagctactcaggaggctgaggcatgataattgcttgaacctggaaggtggaagttgtagtgagccgagattgtgccactgcactccagcctgggtgacagaatgaaactctgtctcaaaaaaaaaaaaaaaaaaaagttatgtctgaactgaccagaagacagagttcagagttcaaggcatctggcagcccctgcccttggaaagccctcctgccaggcactggacccatcaatgcatggtggcttgagggctctgcctttctctctctgtacctcacccacctgtcctgctagacatggtatcatagtgcccatcctctgcggctggctgctaggctaactctccccctctgcatctggactctggcccataggcatagaaagggggctgtgtctatactccatctagtccagtggaggtaacgcacgctgggtttggagcgaggacatgatgtgcgacccacatcggtcccttccatctgcatgaaaaggattttctagatgcagtgggctgagcacaatcatgagaaaccacagattcatcccattgcagccttgctttggcgttttgataggcaacgtggtgtttgagagtacaggactgcaacatttttctttgacatttaccatggaggctcatatctggtgctccttatgtctgcccaggagagttgggagaaggtcagggcagtaagctctggtgaacatcttgaggttaaactcaacccattgctggggagtccaagctctgagagccacctgtgtgagtcttttgatctctgatgtgctacttctctgagttccagtgaagctgttgctcagtggctcagagtgtgggctcctagaatgtgtgatctaggtgaggtcattgccaccttgaccctttatagtcagggcctggcctgccgggcctggctgcatctggcagaagaagggaggacccgctcatctaccatggttgcctagggccttgggaagagtgggagagctacctatgctgcgggtgggttagaaggagaagggtggggtgagccagaatgagcagaggggctccagaggcggatggctacggacaggtggcagtagttgcagaggagagaaggatgatccagcatgctagagtagatatctcagtcttggtcctggtcaggccagcatttcagccttgagccctctcaggggcccagccagcaatctacgccccggctggcgctgacccccttggcactggtttgaatgccatttgtctttgtgtctaatctgcaacgtgtgcagatgcagaagtggctcaattgatgacctgtcttctggagcactcaggggatcctgggaggctctcttgctcagacatttcagaggtgttaagaagcccttggtggagatctgtgtggggaggttaattatgactgtcccccgaccccccacccttttttttccctgtctggtaaccttggcttaatttaagtaagttttaaatttcaagctgagataatgtttaagaactgtagttcttgaaaaattagctctcagggaaagaaagaaaaattaacccgaagaggccagtatgaaccaggcactgtgctaggcattgttcctggtgtcatccatttgtttcttcacagtgaccctggagggtgtttgtttgtttaattgctcgattgttggtttgttcattcgttcgttcgttcattcattcattcattcaatgtttgttgagtgcctaagatgtagcactcaaggcaccatggtgtagtgagtacagggaagatcaggctttctgctttcatagagccatgattctagtgagaggggtgatagacaataaacacataacaattagataatttcagacagaagtgactgccaggaaggaaataaaacaaagtaaagggtgggtgtgtgactttagagaggtgcggggacagcccatctggggagatgacatctgagctaagacttgagggatgagagagcgagagcaacggaagagctgaggagagcaactgcgggcgtcttgggtgggcgtgaactaggctggaatgagagagactgttttgtttgctccattttccagacaaggaaactaaagcatagaacccagcttgtccataattacccagcaaagtggaagagacctttctcagtccaaacccatggtttttctactataacctgttgctgtcaataaactgctagctgggctccattgtaaccaagtgcttttcctgcatcatcttatgtagtccttgtaaactatcctcagacctattttacagatgaggtaactgggctttgggtcaagcaccttatccatggtcacacagccagaaatcagagaatgtgggattcaaactcggatctgtatgacgaacccgctgtggcttgtcaccacaacataggatgatagattcgtttcccatgggccaaggaatatttcctctccttttagagttgtgggagtttgaggcttttcccacgtcacccagccagaaagtgtgggtctcccacctcctgggcagggctccttcatctccgagtactgcctttgtccatgtctggcggtcatgagggactgtttggccatgccagcaccactcaagggcctatttgccaatgtttggccatagagggcaaattctcaatcttagacaagggctccttaaaaggtaaattatcagaaaatagacactgagcacctgttataggttaggaattatgctaagcattgggaaagaaaataatgaggtgagtttggtttatcttggtgatgaaaagtataatctccaagggtaccagaaacacttgaccccactgcccttcttgtgctgggtagaaaagaccagctgcggtctctgcgccctaaaggatctcacaggctaggtggcaacagagagcaacacatatgactgtagtatggtgtagcaaatctcattcctttatcattttaaaaatcactctctattgagcttctctgcagggaaggtgctgcagtaggtgcaggagatacagtggttcagagggcagacaaggtcctgtctttatgaagctcacatttgggggaaatgaaaatataaatacaaatagggatgaagatataaaggagaggtatatggcgctattagaacctaatgggaggtccatcttagttacacgggagaaggcttccttacagatgtgctttgacctgacggatgaattggaagcctgcgatcaagacagccctaggttattgggggagcaccaacaaaggcacctagctcaagctgggaatataggttaggcttcctccagatggagaagtcaaagtctactggtgagaggatggcttgggtttggagctggaggatgttatgaccagtgggagccatgtgtcatttgggtaccattcctgcttgctctctttaggagaccctcctgctccacaaactggagctgcggaagtgtggcagtttgcttgtatcttctgttctccacctctttcctttgagctctgcccgtggctctgtgaataccaacgccagcatataaattatccagcaggcctcagccctcgcccaaccagactcttcgctcagtggcgtgcatgcataatcaatacaggaggctgtcactgcttttagctggggtgctagaaaagaacttcggctttcagagcttggctgcatgccagcatttactccccacgcctccctccttcttgcttctctggctttctcccagttctgtaaggctgcatggcaaaaggttgcaggtgggccatggctcctgtgactgaccccaaaccctcctgtgcagcaattggggaggttcttggttatgccgtggctcaacccagagaactcttaggcaaccggcaggctgggcctctcatgctgctttcctcttgctgatcttggcactgccagaacttctgaccatgtctaaagtacccaagtcttggtaaacaggctggcaagagtgggtataagctcccttgcttccttcctggtggagcagtattgggtgggacattcttagctccccacatcttgatggaaggagctgggttgaccctgacatgcccctccatggggtattcatgaccaagtattactccttggagacattactggggtcattttcttccagcttccttctcctctcctgctcagatcagggaggagaggggatggcttctaaaacacctccagtccatgggggatgtagctgtctcctgacaccttctactttatccttttctgttgtccattccagaaccttgattgagtcctgcctgtatataaagcaatatgaagcatggcacatggttccctacccagaggcaggaatcatttgaaaatgttttcagtcaagagataaatatgattccgaagggatctttgcccatcttggaaagatacgaccaggccctgctctccacactcatcctgcggccactgccctgttggtcactgtattggcacagctctgggtggggaaatgctctgctgggatggtttctatctggcacatgagtttgattttctttttctgttctcctccctgctcagccacaacctcttctgagagaagctgctcttcgcatcattccggatgagtgagcagctgctttgctttgtaccatgtcaccttcccctgccctcctccaaccccgtaatagccatggcttattatggcagaggtgagcacacagaactgcccagccacatcctggcttgcaattgagagcttaaaaaaagatgagtcaggttgattgttctgctccctcaggagtttagagttggaaaattgagctgctagtggggattcttaagctcaaagatcatggaaaggacttagtctgagttgaagttaggagatggtgaccctcagagaggggaggatggtgcatgctgcgaaagcaaagtggcagtatcataaaggaaaggaaagagaaaagagggtgcagccaactcctctgctaatgacttattgtcctagcctgtcccattccttatatatgcacaacaatctcttatcctaactgtagctggaggggacctttgcttcttgcaaataaaaagtttattaatagttcaagtcttctttgaggtgtccagcacttagatgacaccaatggaacagaattttctcaaatgaatgggctgagagtaagattttgagttgtgtttccttccagagagcattcagtcaaacctcagatgttcttttcctatagcttgagaaaaattcctgaaagattccttagcttggttcatggctggcagattcctgtgagggccagctaatgggcatgtcttggttatatggtggcagagaaaaaaacctctgaccagtttctggctgaggaacagggctcctggctccaaggaacattctagtgatggcagaaatgcgaaaagtgttgagatcagcagaggcacattgtcagagctgcattgtggcttaaaatggactttgatgagaggccaagagtagatatctagaaaacatcaggagaggcctctactaagggaagcaagtgcagcagccagagggcagttgagaatcttggccagagctgttggaggttggataaggagaaagtgggcacccaggatgttcactaaggtggtccagccagtttgtctgcagaggcccatttagaatctgagacacccctccccccccacacccaacacacagccttagacacatggcactttgaactaggtgtagggcattctggtttttcttgaaagtagcaataataagagcctctaacatttattatgcacttactatgtgctgggtgctctgccaagtattacatacacatctgtatatttttttattcctgtgaacagatctgtaaggtaggtatcatatttctccatattacagataaggaaactggtgttttgaaagcttaactgactgtcccagggccacacaactagctccaggtgaacaggcataatgtggttcctggcttctctgaccccatgccaagctctcaatgaacccactctgctatttgattggttaatgtgcactgggcctggaacctcaattggggtttgtttcctggctctatctgtgccccagtgaacaaaccagtctcccaggaggtttgatgagccctgaaggctgttgtgttggaagacacctgctgatgcgagcagctgccttggccttttctgaggtggaagcattccaacctgccgtgagccagggaggaactccatacattatgtaggagtggctctccccctgcagtggatattgtagacttttgtacctgcagcaggcgagtgtcagctgctttggaaatgaagcatagccctggaagaggggaatgaatggagaagaccaagggtaagtgctgctttagggtccctctcaccagattgtgacagctcctggcattcaacaatctctggcaaagctggggcaatggggtgcatctcaggaatagtttactgtcagagtagtggttggaaagtccttgctggttcatctgctttgtctggtttgggggaacttggtacagcacagtggcaggcgatcttgggaaggaggccaacccaaatcttcaaccatctgttaatggggtaataggttatgttgtagcatgagtgagttgtcttaattgggcagaaacttcagatatggttgccgatgcggaaggagactgagcaactgtgcatcggttgtgaatgtgcaacttgggggatggggttcatggaaatggatgtcagtcttactgaaactccagtgcatggttctcaaggtcacctggggtcccagagtcttctgggaacttgtgtgaaatgcacattctcaggccccaccccagacttcctgaatctgacactctaggggtgggacccagcaagttgtgtttttagaagcctttcaggtgattctgatgcacatggttgaaaaccatagctgtagagtatgctggggtaagtgatggtatggtgtcctagacagatcttgcagctctcaggatgagaagagaaaatcctgaactgacttgatattatgtaattattatataattaaaagtgtgcttaatacatcctttatggattaaatcagattaatcacaatggttctccaatatctcaggcaaaattcctgggtctagctactcccctcatccttgtcatgcaaagaaccttccccagacttcagtgggagatctattgtttgatcatggggtttggcaggcacttcgttaaggtggtgtgatataattttctggacctaggttctggccctactgtgtatcagtctcttgagctatggggggcctctccctggttccagggctcagcttcttcatccgtgaaatgaggctggatttggagctcttgaaggtccctcctcggggtgacactccatggttctcagagatgtcccaaggaaaggccatggttacatcatgctggaagcagaagtgttgacactgccatattttcaacattaatattggaagtgacagcctgctgaccatctggaagaatctctcagggcactgaagactctggaccctgatttcagaactgcattttaggacaggtgcctcattaataggaatgacttcttcctcgagatcgtagccaaaacaggctccctgactttgtacagcctaaattctccacactgtcaagctgtttgaactctgtggtcaatctctacaaaagggcaggcccctaaccccatgtcttctccatctggccgctctggggcttacagatctgatggcttctgctgggcaactttgatggaaatgcatgtccagatctcgagctggtgcagaaaaggtggtgagaggcacccagcctgctcacgttctgtccttccttggccgtagacactgttcaggcatgggggcagtggtgaaggagcaagaagctgggagttggagcagggggagcctgcatcgaggactggttgtactcccttggcttgcatgggacttctacgtcagagtgagagaacacgcacaaatctgctgcaattgaccttttaagtcaacccgttgcatatgtttgctacacgaaggagctgctgacaagtctcgggctggagacagaaggtggagaagaaaggagaaatctcaccaccacgggctggtgagacagagcagtgggcagagacagagctgtggtgatgctgtcagccgctccgacatgctgttcttccatcttctccgatgacgcgcgtctgaagtgtgactcggaggccgcaggaggaaagtgcgatgagcctgcaccattcaaagcctctctctgagcaaggtcgccagggcggaaattggctacagcgaccaaggccattgaatctaaggtccatttctggctagggcttcaaccaagggaagaatgggtggctggttcaggtgcagcccagaatgaaagcagtggggagggagaaactcccatagctgccatgggtgagctgccatgggtgagctgccatgggtgagccgcggcatgccttccaggatgagagagccaagtgccatcctgggtgaagtaggagggggaaacgaaaggctgggtcatttgagacaagcatgcctccattaccctgcctgaaaacgaagggaacacctgttcttgtctgcagtcagagaggatttgacagaatttttaaagtaaaaagtgaaatgaaatttagatcagcctctgcaaaaggactttgtggatttcctgtcggttaaagatgtggcagcattattgttcctgtttctggagatgtcaagagtaaaatggtgtgacgtttgtcaagtgcttggacttactataaccagacatgctgccgggggccttccctgaaggtcacctgtcagggctgtaaagtcaggggatgtggggatgggaggaggtcagctaggtcacctgaaagtccctcctaggtctgtgaaaaatctgttagatggaaaaataaatggcagggatgggctttctgtttctatgtgtgttggccaggtgggctaaacagatctctcatatcaaggccaacccctcactgacaccctgcgagggaaaacttggttgctgtgggtggggacagtgtccctgccaactgttaagagtccctgcccttttccagggacaagggcaagacaggaaaaggggaccaatttccgagtactgtgtgctagactcaggtttgtgatgtatattattttagttttataatcctaacccaatgccataggtagaattagcattttctgtattacatatgaggacacagaggggcagagccattagaacactagaataaagcaacacagctagccagcaagtagagatagacatctaggaccacagcctggtcggggctaccatccccctctacttctctggctggggatggggcttgttggctctttcaatacatgggcatgtcaaggctcatatctgagtccccatgcctttctctttacacatgagatgtttcctcttacacttatgtccatagagagggctttcccctgggaatgtgccctgggggcctgaggctgtgagttactgtgcagatgtgaagtaccaggtgtgctgaaggcagattggtttgtgagagggggcaactcctttgtttcacccccaacccccatgtgagatgaggcttcctggggcccaggggcaatattactaataattactcattgttggcattttggagctaggtaaagcattctcccattgctactgtttcagggttagacatcagtgacgagtagcctgggatatggcactggctcccaggtatgatgtatttctttgatcctagtctttttcagctgctcggctcagtttcaaaactgggtgggaaatgtcacaggctcattttcttgttgtttttcttctgtcccctgaggggtatggccacatgcagagaggtggaaaggagggacaggaaatgggaccaatccacctgtgttcggaaacctcagttagtgttgctttatttccttcaccaatctgataaggttttccgttaccactattaatacatagtactttatgtgatacaaatgataaacactaatactgaaaactttaaaaagtcagaaaagcacagagacagaagcaaaaaaatcactattttcctaccacataccattgttgactttttggtgtagatccttccaggtgtgtgtgtgtgtgtgtgtgtgtgtgtgtgtgtggtttgtgtgtgtgtgtggtttgtgtgtgtgtgtggtttgtgtgtctgtattagattgtatacacttctttttttatttgtttacagaaacacactgtgttgtctgatttttttttcctgattttagtgttataatgtgagcttgttactgtgccagtaggtattctttaaccttttattgaaagggttgtaaaggtataaagtactccattacagagatgtaacaatttactttattccttattgttggatatttaaattctacattttctatatttaaaaataatattgttcctcccgctaaagtttatgccatattaccatcccacctgcagagtataagaattaacattttccagcccctttataatgtatttttgctaagcctggcctattagataggcctaaaaaagtgacatttttttttttgttttaaccttggccagttctaagaaagagcacgagcatgtatgaatgggttcttcagtggtgtgaggaaaaaatatgtttgccaccttggtttgtttttctttatttgcctcttggtttttcctttgtcagcgtaatgcagaaacactagatctccaccctaagaaaaaaggtatataaaaatatatttagggatatttctcacagttttatttataatgttactgtgagaaaagttttaaaaagttgaaatatcttaagttctttggatggggaattacttaaattaatggtggtaatgaaatattatgctatcatcaaaataacttaatggtgtagggaaaaatcaagctataaactatgtatattatgatctaaattaaataatatgtgcatagaaaaaagactacaaaggttaatgttaatcatttctaagtggcataattgtgctttttctcttgtattttcaaaaatttctagcaggcacatgtattattattgtaatcctacacaaaacaaatgttagcataaattctaaaatatcatacatggcaataaagagccgtaagtaactgggttttgggtcacttggattctactgaggactttgtaggtgatggagccttttcacgttctttgaggtttgtggagttctttggaagttttcaggaccatttcataggaggggcttctaggagaccagagtcaaagtgcggagaccaagagtagctttctatctgaccttctgccctttgtgttgatgggggcacaggtagtgcaggagaaatctatttaggtgcccgctgccccagcccacagggcacgctgaacatgccacccaaggtaccagtggatctcaggatcactgcagttggtgtttggagactgaagggctggggatgccagagggttaatgtctaaatatcattgcgaggactgattggatgtgtttaagtatttctgacaatgacaagcataatggggacagaattctgtgccaatccctttacctactgatgaggaaatggaggtctgggggggattaagtcacttgcccatgcaagcatctttatttttctttcccaacccagagtaccactggcatggtgcaatgtgtcatgtgttgggtcttttcagattggctgagacgatgcacggcacacttggatgttgttgaagtacttacactttgcttgggtagagtttgcatgaaagagcattatttaactctttgagtagtaggattgggcttcctggaggaattgaggtgaaagatcaaaaagttgattgtggcttggcttaggccaagagggtaaagaggagtattccaggtagagggaacagtctgtgcagaggtggagggacagcagggtgcattagagacaaagattgctgagggaagagccagctgcaggatgagagggatgcatctaaagaggtggcagacagctgggaaagggccttgcctgccaggccagagtttggactccatgttgagagccaccaagagtcactgaagagctctaaggaaaggagttgtgtgctcgaactgaaattatgccaagatcactttggctccagtgtgggaatgggtgagagaggaccagggctgaatgcaaggagataagtgaggagtctaggtcaacaattcaggtaagagatggtgatggagttaagtggcagtgaggatagaaaggggtaggcaggcagaagggaagagtttgtattgagcaattgggaggttgtgggtgccatttgatgaggccaagaaaccagatcacaaagcaaatgtggaggctgctgggaggttgatgaatccaggttggggcatattgtgtttgcggtacctgtggggcacaaaagtggagatgccctgtctttttgttttgtaaagtacccagtagaggctcacttttttcctctgacaccatggaggagtttctctatgtacaatgagacttgtcttccaaaaccttttcatgactgcttttcccaggtgctcacaccattcctgtgaagtggactaggggagcttttctcaatgcagagtgttcagacacagtatcccatgaaatggtgttcgtgttttcttggaatacagccatgcagggggtttccacactgtgtttggatcactcataccccagaaatggcaggtttctcctcctctagtctgcccagaggagggggacctgagtggggaagaaactctctcttgtgccctgagaagaatgcttctctctctgtaaataaagaggaacaaaggcccagagagcccaagagaggaaaaaaaagagtgaaaggctgagatgagattgctcccattgcttaactagtggcctccttggttggtagggcagctggcaggactaccgcctgcactccttccctggagttactgtcctgaatgttctcagggtggttacacagacccatcttgaggtcacttcatggtcccgtttcataactggcagggatgttggagattatggagtccaaactgtggctcaaagtgggtggtgagcaacttgtccaaggttacacagtgagttggcctccaggcttcttttcctgttttgccacatcggacattcttttttttttgtttgttttttgagatggagtcttgctctgttgcccaggctggagtgcagtggtgagatcttggctcactgcaacttctgcctcccgggttcaagcaattctcctgcctcagcctcctgagcacctgcgattacaggtgtgcaccaccatgcctggctaatttttgtgtttttagtagagaaggggtttcaccatgttggccaggctggtctcgaactcctgacctcaagtgatcagcccatcttggcctcccaaagtgctgggattacaggtgtgaaccaccgcgcccggcctccccacattggactttctaaggaatattacctagccacagatctacagggtgtgtttgtttcttaaagcctgtgaaaacccaccccttctttttggtttgtttcttttatacgacccttaaatgtctttctccagagccctgccacccaccttcttcctgcgcactctaccttttctctctgtgatatcttttctaatcctatgcttttcactactgttcaagggtggatgactccccagttgatacctctagccttgaactctctcagacaccttatattaccgggcttctggtcctctccacccacaggcacatcaggattgacagctgcaaaaccaacagtgttggcttcagagctacacaggcaactcctacttgttcttacaatattgaatccatagtaagttgagaattagacttaacacacccaagtctgcgtgtcatcatttcctgcgtatctgagtgggtagcatctccatctatccaggaatctgagctggaaaggtggaagccaatttcaatatccctctttccccaccacgttagtcatcacgcccttttggttcttcttttaaaatatctttgaactccacttgttcctctgtgtctttcttgccaatgggccattatcagctttcaacagaacactttggtgccttcttggggggtcttcctaccacccattctttttttcttccattttcttttttcctgacgtatggtggtagaaatcttaaggaaataaaactaagcacagcattccttgtgtgaaatactgccttgcctgtaaaatctcattaatgtagcctaggcagtggctaatagcctggactctggagtcagactgcctaggtttaaatttcttctacttgctgagttagcataggtgggttatataatctgtctgttcttcaattttctcacgtataaaatgggcgataatattaatacataatttgtagggtgttagaaggattcaatgagttaatatttgtgatatgcttaaaaaagtgcttagcacatagtaagtactacttatgtagcatttactacgtgctttgttagtgtgtgccttattaaataaaataaatatatatccttagcttgacctagaggcctttcaaaactggacactgttgacctctccaagctcaagttctctatcctcctgcccttgacactgtgcctgcaataaaactcaacagtttgtcattgttcagtaccattgtgcttttccttgtgtttccttttgtccctggattcttcttcttcactcttccttcccacctctcctcccccttataatccttcaaatcagttattcatcttttaaaattcagatcaaatgcctcctctctgaggccatccctataccagtggacacagataacacttctttccctgagctacttctgtgcccatgtgtgttttattagagtgacgaggctggagcctctggagtgggacagacataattctaattctgatttgaccacctccaagctctgtgactctgggcaagttacttaacctctctgagcctcatctgtaagataggagtaggttacctacttgatgaggctatgtgaggattatatggccgtgtgtgtactgagtgccgggtccaactctcagcacatggtaagctcacagcaagtactgtattgttatgatttccactaatacagccattatgtgctatttaatttgtagttcgcgtatgtgtccccatgacggttggggccctgttttactaagctttataatcccagtatctcctgtagtagatgatcactaatattgacagttaactgaacttctgggcctcaacactcatcatcccacttgagataaaatcagtgtcttggccacacagacctcccaagccttgtccccagcaggttggttttgttttcttgaagcttgtctgaaggagataagtctgcacctgggaggtgacaagatgttctaaaccaagcaggtggtgtgcagcaaggtgtgaaggcttgcttgggagatgtggctggaggtgtgaggggggcctgagaccttggtgggcaggactgtgccagctgtgggaagaagaggcaggtgaaacaggaagagcatggagaacctgaggtaaaggagagggcagccaggggtggaggattgcggagcagggctgaaggagaacacagaggctggacaggtctgctctcagggccggtgcgattacctcgtccatcttcctatctgctcatgtgctatattagtctgttctcacactgctataaagacatgtctgagaacaggtaatttataaagaaaagaattttaattgacttacagttcggcatggctgggcaggcctcagaaaacttacaatcatggcagaaggggaagaggcacattttacatggcatcaggtaagagagagctagcaagagcagggaaaactgccttataagcccatcagatctcatgagaactcactaccacgagaacagcataggggagccaccctcatgatccagtcacctcccacctggtccctccctcaacatgtggagattatggggattataatttgagatgtgatttgggtgaggacacacagccaaaccatatcatgtaccttgctgagaagtggactttccctgaaccctttgttttaaattgcagtcctctccctcagcactcttaattccttcttatctactttattattttttcctgagtacttgtcaccattgggcatactatttgttatatttatgtgtttgtttattatctgtctctctccactagaatttaagagccacaaaggcaagtattttaatctgtttacactgatgtgtcaccagcacctagaacattgcctgacacataataagtgcttaataaatatttattgaatgaatgaatcccaccacacaaggatcactgcctgtcttagtccgttcaggctgctataggaaaatagctttgactgggtaatttagaaatgacagacattttttactcatggttctggcgagtgggaaatccaggatcaagttgccagcagattcagtgtctggtgagggccagttcttctaggtggtgtcttcaatgtgtgctcacatggcagaagggccagaagggataaataagcttcctctggcctctgctgtaagggcactaatcccattcatgaaggctccaccctcgtgacccaatcacctcccaaaggctccacctcttattatcacactggggatgatttcaacatataaacttaggtgggggaatgtgagcattcaggccataacactgccatttatatttttgtgttcattcatttagtaagtaggtttccaaaaatttgtttgaggtgtaagccatgtacaataaagtacctcaattttctaagtgtacaatttgagtactggcaaatgtatacacctgtgtaacaaacaccgtagtcaagatagagaacatttccatcacccccaaaaagtttttctgtgcctcttggtggtcagttgctgtccccacccctggccccaggcaaccacgatgtagtttttgtcattatttatggacttttctgtttccagaattttatgtaatggacttatgtcttgttttgctcagcataacattttaaagatttatctatgttgcaagcagccgtggtaaatctgattttattgtcgagcaaatcgtttttttaatttgctttgtggtgttttgtgaccaccagggagcatgtgctgtagatccaggctgcctggttagagttttggcttcaccactcaccagctgtgtggctttgggcagttttattctcccagtgcctccagcctctcatctgttaaatggggtaatgatcatacctaccttatagtattccagagagaagaattaaatgaattagacacataaagtgcttagagtggtgcctggcacatagtgagtattcaaaaattgttagctgttattacttccattttgcaaatgaagagaaaaactcctgaggcacagaaaagttgtttgttcagtgttatttggattgtaggaagaattagaattgagatctgtctgatttcactctttgtcctgtcacctcctagagtctggtctttctcttttgggctaggctcttgtgggtggcacacacagaagggggatgaagggaaaaagcaggtactcagcttgggggatgtctgaatcctacctcagtgttcacttagtttttctccaccgtttcaccctccccaccactgtgggtagagtttcaccccctcctctggtctgccaagggagtggagttgggccttcttgccctttgctcccctcctgggccctctcaggcagctgagccttgcatcaggaacacctcttgcaatcacacagcatcagccctgtgagaagctaatttgataaaccccactccaaagctcattgaacctgtctataacgatgcttaattaaagtgcagaaactttgaagagatagcaagttactgcttaatgcaataccagagtgccactattctaacgtctgcctctttctctgcagtaattgcttcctgacatttgtttattttaattaggagagcagtcttgatcaagagggagggcagacagggtcagaactgttagggaggaggaagaaagtggaaaaggggggctatgctgttgtaggggtggcccgaaggggaatcactgttgtcttcatggtataagtggttttatctttccatagggatggaactgtagaacttcctccctacagtgaaagcataaggctgactctgggatcatatgcttagggtctgggggtgtcctttagaaagtatgggagcttcttggctagcaaatggagcctcctactttgttagaagggaaagtatagatggagctggcagatctcagagtggtgttctgagcacaactaactagattactgtgactcagtggagacacttctagtaccaatagggtctcagagctgagagagagagatggtcattcatatctgttagttctaatggttctcactggtggtttcacagtgtgtctggttatctttgattgcatgttggtcattgtacatgaaaatgatttataagtataacttaagcctgagatgatgaaggtgccttcctctacagaacaattttattttatttttctggcagacacttgagggcactataaatcttgcccccacccttaaatgaaattaatggcttgaggcttcctcaaaaacaagtgattcaaacccagtctgtagattctcttgaggactagtcaatttctgatttatcctcacccttaggggcccagcttattgtgaggagggtctacttttggtctccccatttcatgtgggttctggttgtggatttttttctctcttgccctgccaggctgtcaaaataaagatcaaatttgccagactcacaagatgtcttcagggcaaaagtgattttcatacttgtctggattcctgtttcctttcacttttagactagtctttccttactatctgatcagcattttggtgattttaagaagatacactgtgctttttaatccagatctttagttgtttttaatggtaatagcctgccattaccagaaagaaaaagtcccctggtagcagtttttcaattagatatatttttacttttggtagtggaacttttttttggtcaaatgaaatcttacatagaatctcaataccaaaaacaaaacaaaatgaaataaaaaaaagtggagcttttctggttaaaatgtggtttgggggtctccagggcctgccaactaggcctcccttttgttagacccacttagagcatctctaaggacctgggttttatggacatggcttaaaaaactgttctgaggagctccctggtttggctgattttgaggaaccacagctttggcaaaactcatctagtgctttccttggaaacaaatagttcttgatagtttaggatggctagaagcctaggccttgggtagcatgctacaagaaaggacaggatgtgctgcctgagtcccagagagcccctgtggaagtcaggccaggttagtggggatcatcttagtcctcttaggaagactgatctgagatgggggaagagaatggaaggggaattaggatgagttctccaagaagcagacatcaaaacaggattgattagacatgcaagaatcttattgagggagatgcctatgtaggattaaaggggagggagcaggaaggagggagagtgttcagaccttgatgcacacctgactccagtgaaaggagacagcaaggaaagattgagtaggaagagcctcctctgcagcccagctctgagaaagtctcagccaggctgatgggaagtccccaagcaagagttgattgttagaggaatcctgaattggatgggaatggattggcatgagtactccaatgtgcttggttgttggctggaagcagctttgggggagtggccgcaatgtgaatgcagtgatggatccaaaaggtggtagctgtgctgttgtcaactctgctctctgtggcatgtcctcttgaaagagatctcagtggtgcacttccatggctaccctcataggggagggccaggccacccagagagcaatgaggcatttgctgaaacacagcgagaggggagggagagcaaaacatatttttccagacccggggacagctatagtgaactgttgtctgtttattcgccagaaactcagtgtccaagcaagtgggatttgctcagctcatgtgagcatgttatctgagtttgctggcagcaggcccatagtagcagatccctcttcattacctaaggataccctgatgtgtctgttcctgtggtctcttctaccttacctccagcttcctaaacccttccagtggtttcaactgttcttcacataaagactgcaccctttatccttgccttctgggcctggtctgggccctttctagccctccattcttattgcctactatgctttcctccctgtccctgttccagccccactggcctttcagtctcttgcacttgccttgctcattcctaccacagggcctttgtccatgatgtttcctctgcctggggtgctcttccagaagagtctctttccttcatatctctgcacaagagtaacttcttcagggagggctggagtcccctcctagtgctctttaagtaccgtgttcagacatggtacattgtgccttggtggcatttgttacagtcacagtttcacatctttcctggctggaatcagaaatttccaaaattcctgatttttccaataggctaaaagctccacaagggcaggggctacctctgtctttgctgatcattgtgcctccatgccggacacactcgggatgcttagtcatgatgttttggtctagtggataatctacaaagagggtggtaaatagaataagtggatattcgatcagtaaaaagaaaataagtgttgaaacaaaatacaaggcagagcgaggcacactactccagaggtgggagtgactttcaaagtccttgtttgcccagcctccttgtcttgcattagaagagaccaagcatcaggaggccagtgacttccccgtgtttacatggcaaggggcgccagagctggggctcacaccttggtttctcgattctgactcgagtgcactctttgctgtggggggccttgcgtggtcacggagcatgagatttgaaggcaaatgcctgggttccatatgggctgtcttctcagagttgatttgaccttgaataaaccattaacctgtaggactctttcttcgtctgtaaaatgggggtggtcatgtgcattttaaatggaaactttgaatattaaatgagataatatgtgaaagagtgctcttttgtaaactctaaagtattttacaaatgtcaatactgtgccacgtcttagtattttcaaagaagcctaaacccactggagatgggggtggatgggggtactgtccagaccctgttgctgatcctgttcccgagcccactctggccctctccccctgaccctgtagatgagatctttttatgtatttctaaaaaggagctaaaacgtttttggagcatcggctctatggaggagagaggagacctgtgggatggaccagtgttttagcttctgggtccctgctccttcatcagtggaaggaaggggttgcctcatgtctaaaggctcctttcagcaggaagctccatcagtcttcatgaacaggacgagctcaaatcaggaaggggaggctattaccagacaggctcccaaacagggcacaaagcaaggggaggcggcatggcctccagcttgaaagatttgttagatcccagaaagaactttctggcattcagaatggttaaatgctggacatagagaaggcaacaaaggttgtggaaattgcattctggaggtctttataaagagaagaaaaattcaactggagttctgttggaactggggaaatagactaggaagcacccttgtccacagctgtttcctgccgctgctttgttggtgctgggaagtttcgtttgtgctgggggggtttcgtttgtgctgcaggggggtggggggggcaggggttagtttgtgcacctaggtggccactctttggatctcccacatctgttctgggttctgaactttgaccccgttcctgcttcttccttcttaagggcatccctcccagggcttggtctgggtgccatagctccagataataaaaactcagcctcagcagtgattgataaactgctctgtgtgtaatgataacatggggaatttcctgccaagatgaccaatcaaagaggaaacagaggagaaagttttgttaaaaatttttagggagcatggtataaaaactttaattggttttatttttgcggccatttttccgtgtgtatctgtctcccttcctcatttttaaccctcttgagactggatagagatttcccaagcaagtataaaagtaattatattcaaagacagattttttttttcttcctaaaggtatcaagttaattgtcttttctggggctaattgtcttttctttggtccaggtgtgaaatgacagcttagtgccgatgacagtttgcatttgtaagtccttttcatatacatgatctcattttgtcctccagatgtctctgtggcttgttctttttgttccattgctcagatgagtaaactgaggtcccacttggcaaagctcacagaaccagtgtcagctctgctgtgaatgctgctgttttcccatcttgttctaccactacacaacacagcagtggggaagctacagggtttcttgttctctagctggccagagcccctgagcttccctgtggctggcaaaggcaagttggcttgagacaatgttttcactggttggtaggagaatgaagacctccccagcaatgcagcgagtttgaaaaggagcatagctttatgcattagtttcctgggacagctctaacaaagtaccagcaactgggtggcttaagacaacaaaaatttattagctcatagttctggaggccagaagtctgaaaccaaggtgttggcagggccacggtccctctgaaggctctagggaagattccttcctcgcctcttctcggcttctggtgttaccggcaatccttggcgttccttggcttgtagtggcctcactccagtggccacttccatcatcacatggttgtcttccctgtgtctctgtgtccacatctctctatccctctaaggacactagggattagatttgcagcccggcctactccagtatgacctcatcttgacttgatgacatctgtaaagaccctatattcaaataaagtcacattcacaggtaccaggtgttaagacttcaacatgtctttctcagcccacaacacctcatcttagtctagccttcctgcttatttgatttaaaaattacccttttaatacacaaaattatagttctcatagatggtagtttttattttataaatgtatgagactcagaaaaatagcaaaccctcgtatttttatcactcaaatgaacaattgacatatattttcttaacaatattttttaagaacaaaaatattacaaatgtagatttaaaaattattgttaaccatcttctcacttacattatcttctctttttgctgagagcagtggttctcaaccaggacagttttgggggtgctactgtcatctagtgggtagaggccagggatgttgccaatcatccagcaatgcaaggagagcctgcaacaaggaattatctagtcctaaatgttaatagcactcaggttgagaaactctattttaaagagaagaataatcatgatattgacctgcatccttctagaaatattattcattctttttcatacatttacaagtctgaatggtattgtattgtggtattgtattgtgcatgagtattctcttaatgtatataaatagtatttcttttttagtttgagatggagccttgctctgtcgcctgggctggagtgcagcggtgcgatcttggctcactgcaaactccacctcctaggttcaagcgattcttctgcctcagcctcccaagtagctgggattacaggcgtgtacaccatgcctggctaagttttgtatttttagtggagacagggtttcaccatgttgaccaggctggtcttgaattcctgacctcaagtaatctgcttgccttggcctaccaaagtgctgggattacaggcataagcccccacatctggcttaaatagcattgtcttaatgtgtataaacagtgtcatcacatattctgcatcttgctattttcctttctttaacatttttaaagatttatccatgttcatatatgtatgtgtatataatatacttatgtgatttcttttaactggtttgtagtttgttgttttataaaaaggcctttatttgaggcccagtgttcaaaaccagcttgggcaacatagcaagaccctgtctctacagaaaaaaaaaagttacctaggcgtggtggcgcacacctgtagtcttagctacttgggaagctgaggtggaaggattgcttgagcctaggagttgaggctgcagtaagccatgctcacgccactgtgctccagcctgggcaacaaagaaagaccctatcgctctctttttttttcccaaagtctttacttgatgaaataaaaaattaatcttatgtccttactaggcacattctctttttgtagggggtcaaattttatttccccatgacatctataagtctagaaacctggccagatgccacagggtagacccccagtcctggttagaaagcatctccattttctgggatactaattctctctaagaacttaatccttctagaataaagcaataccaaaggccccaggagtcctcaatcagttgctaagaagaatgaaattgcatcacaattctaattcatagcatctgtaaggcagggccttccttggcttttcaaattttctaccttccctcatttctttttcttacctttgggattggaagagtcagaagtgatggggtacctaagctgtgagagtttcctttaatccttgaggatttctgaaagagagcccctctgtattggtttgagggctgccatagcaaactactacagactgggtggcttaaacagctgaagtttattttctcacagttctagaggttgaagtccaaggttttggcaggactggtttcttctgaggcctctctccttggtgggcagatggctgtattctctccgtgtcattacattgctttccctctgcgtgtatctgtgtccaagtcaccacttgttataaggacaccagttagattggattagggcccaccctaaggacctcattttaacttagttagctctttaaataatctaactccaaatacagtcacattaggtactggggttaggagttttggtgggaggggggatgcagttcagcccccaacaattcctgtccaatatacagggtgactatttccaggggatggggagaatcagtggaaatttcatgtgacatctgatgctgagatttttaacccaatgttaaatttaaagttagtaggattggaaaattagacctcttaaagtgaggtccactgagattttggtttccaggagacattgaatagggtgagaaatttccaaaaggccactgttgagaaacctcatcagataaacacagaagaccatgtagcccaagtccaaattattaatctcaaaggccgaccaataaaggactcagtggaaagcaccctgatccaagttagaaggcttgggtttcatcttggccctgcctcttagctgtgtgaccttgaacaagttacttagactcgacgtcttaattttccccacctctaaagtggaagtaataatacatcagtggatttatgcaaggataagatgagcacagtgctgggtatctggtgagttttcaaaaatgttatttgttcctagaatctgaatctaaggagcttggactctttcctattggcagaaaggagcttctttagaagcctgggagtgatctctttaaatgtgagttttagaaagttaattctggcttggaagcagtacgttaggagagttggaaggagagagaggttggaagtacaaagatcagctattaggcttttgaaataatccaactgatgaagacctgtttgaactgagttactgaggtggatggggatggagggtagaagggaagaggggtatagaagagaaaaggagagagaaggaaaggaggagggatattgagaagatagcatcagaacataagaaaattgattggatgtgacagtgtgagagagaggagatgaagagcgtgggataatgcccaggttgctagctgggcctgctgagtggatgagaatactaaggaaggtaaattcagaaggaacagttaagagaggaagtggaggaggaaaacaatgagtttggttgtagtcagagtatgtctgagttgtctagggggcatccaggactaagagggtcaaggagagtgggtagtttgtgaagagatctggagatggagctccagggaccctgacatctgaagggtggtggggagaaaaggagcacctgagagtgactttcaaaggtgtgcagagagggaggaggggaggcacccgaacatgccaggaagggggcccgaaagcagcagatgcagcaggaaggcctgggaggtgggaactgagaagaagctctggtttggtattttggaagccactggtaactttggggagagctgtgtgagtcagggacatgtgggggcagaagccggaatgcagaggatgaggatagaaagggagagatggagatgatgagttttgatggagaaaaggattacagagaatatcttcaaggcgagggaagagggaagagtcccgttttcttttaaggtaactggcatgctgctgggggcagggggtgagtggggagcctatagaggttcaagaaagtgttgatagaacagggtcccagggaggtggcagggcttggagaaagagcactggggataagtcagttttaaagggaccgtttttcattgagaagggaagtagggaaggtaggtaggagagaaagtgagtagccagaggggagagaagcacaggccttcatgactaaaaacctcaatttttttttttcagtaaaaaaggagcccctgtggcatctgaatgaggaaggggaaaagggtttagaagagctggagaagggagcatattggggaaaagttgaaggattgctaagtagctgaggttgagagtgacagaaccatattgtagttgcatttgttggcatagatggggttttggtttctagtgcctatctgttgctcaggagcaggggaagtggttgcttagattcctcaagatagagaactggtggggtggtggaagttcaggggatgaggtaatgattgactatgcagcctcttctaggtaagaagtgaagagaatggagtatgggagggatgatagactgtgagtgaagagattagggtgccgtatagctttggtgaggttagcaaggagggttaggaagagacaggagatagaaataagattttcctgagataggtatttgctggagaggtagttctgggttgggttgaagtccaggtcggtgataagggagtaggaaaaagggtacaggttactggagcggaggcacaaaggccatgaagccagggcattgagcacatgggcattgatcacagtagtgggagtcagggtacagagggaaacatagccagttaaatatctcagtggatgtgggagagtaatcttggggtgatatattggtcagttattactgcataacaaacaatcacaaaaaactggatgatacgcaatagtaagccttgatttagcttccacatctggaggcagtttgatctaggccttactcatctaggtaattccagtgatcttgcacctgcagtttggatggggtttggctgatctaggttgttcatagttggggtgggtggctggaatagctctggtcattgacctgttggaactggtgggctagaacaggcatgcttatctcatcgtgagggcagaggtgccaaagagcaagcacttttcaaacttttggtcatgtcacacccactaatatttccttggccaaagcaaatcatgtggccatgccagaattcaagatatggggaaatagactccacccatgcaggcaggaggcgacagtgagtgaatatttctgaacagtaacataattgactacaagtggtaggtaagagctgtgaagaggaagagaggtggggttgcagatggcatgaggcccttgaatgatgacataagcacagaggggaagaaaggatactgtctactctgctcccatcctgagatacacatggccccaacacagagtgtttggcagagacatcatttgattagagaaggcatagctttctgtattgtgaggagtcaaatatgaacagtgggaattctggagggcacagagggaagaattcgaaagaggcattgggaggcagttggctacccagggccagagagcagctgctggagcagggaggtcctagccttaggaataaagggcacacacacacacatacacacacacacacacacacacagctgctagaagagcgtgggctcacccgaggtaaactcccacaaagccttattattttgggaaggtgttgtaaagaccagccgccacatcgccttgaatgaggctttgggtgcttctcccttccggactaactgaggagggcagatgcttcccggggaggagatagttttagggggaggtggtcacagatctgtactatacttgggatttcacaattgcttttactctggcagggtgttgggaacttttttttttccttttggcactacaaataaggaagccagagggtgagtgtgggaagaaaactatttaaatggagacacagtgatagaaataacatccatccttggaaagagaggctctacaagaaaggtggatgaggtggggcacatcagacctacactttttctctttgcagagcctctcactactttttgaagttcttgatcttcactttcccactaggctctaagctccttgtagtcaaggctggacttgtcttattcatagctttatacccagtgctagcagcacactcagaacataataggtgctcaataaatacatttgagtgggtgagtaaatgcatgatgaaaaatttacaagttagtatatccatctccacataaaagaattcaaaacttatttttggtaatgtcactcaacaaatatttagggtcctcttgaatattaatcaggatgactaggcattcatgaagtgtgagacacagtgcttgccagagggttgcatgacttcacttgcagctttgggaacactaactaacaatgcagagtcacgtgaaaatgtttcagacctcagtttgtccacctgcaaaagggggaggctgaagcattcattcagatttctttcctacaaggcctcttggaatctttaatattctattgttcattgtgatctctaaaatggggaaaatagtctgatgcttctaaaatgtatgtttttctttcttttctctttttgccttcagggcattttgtgggactggttttctatggagcacatgtttggaaatgtgggcttgactaattctgctggatcaattcttgttgaatttcttttgaaggtcattcccctcccaccctcctagatgtgcttatatcaaatgtaatagtgctttttcccccttatacttaggatgggatggctgctttttagagcacccagtggattcaaacatctggctatcctttgttctgatgatgttggaggtggatgttcaggtttcagcgttgggttgtgcctgttcttctactttggtccactatccccagagcaccctgaactccatggaggatttgaagcatccaagataactctttccctgagggatagggggacaaagggactggcttatgtagagatgtggccagaggttgggagggctggacatgctgacctgggacaggatcaggaattctgaaaatcaggcagttccaaggtaaggtatggagtctagaaaggaggctatttgctacattctcactcttttggattatatatctggataggatgtggcttcaggtattgggacactctggctgcccaggcgtattgagaatggccatggatggttgagaactaggcacggggatcaagcccgggcccctctcctatctaccctggatatgagccgtggccaccttattagtctgtctgtgtcctgctgtattcctttcaaaaccgggtcccacaccatcgaaaatacagactttgtctcatcactccctctgtttaaaatcttccaacagctccccaagactttcttagcttggcatccaggacctttggaactctgccctcaacaagactttttttttttttaacttttaaagttatctccttattaatattctctatttgatgagacattgtcatacctacatttactttttttgttttattttattattattatactttaagttttagggtatatgtgcacaatgtgcaggttagttacatatgtatacatgtgccatgctggtgtgctgcacccattaacgcgtcatttagcattaggtatatctcctaatgctatccctccccactcgccccaccccacaacagtccccagagtgtgatgttccccttcctgtgcccatgtgttctcattgttcaattcccacctatgagtgagaacatgaggtgtttggttttttgtccttgtgatagtttactgagaatgatgatttccagtttcatccatgtcccttcaaaggacatgaactcatcattttttatggctgcatagtattccatggtgtatatgtgccacattttcttaatccagtctatcattattggacatttgggttggttccaagtctttgctattgtgaatagtgccacaataaacatacgtgtgcatgtgtctttttttttttttttttttttttttttgagacggagtctcgctctgtcgcccaggctggactgcggactgcagtggcgcaatctcggctcactgcaagctccgcttcccaggttcacgccattctcctgcctcagcctcccgagtagctgggactacaggcacccgccaccgtgcccggctaattttttgtatttttagtagagacggggtttcaccttgttagccaggatggtctcgatctcctgacctcatgatccacctgcctcggcctcccaaagtgctgggattacaggcgtgagccaccgcacccggccgcatgtgtctttatagcagcatgatttatagtcttttgggtatatacccagtaatgggatggcttggtcaaatggtatttctagttctagatccctgaagaatcaccacactgacttccacaatggttgaactagtttacagtcccaccaacagtgtaaaagtcttcctatttctccacatcctctccagcacctgttgtttcctgactttttaatgatcgccattctaactggtgtgagatggtatctcattgtggttttgatttgcatttctctgatggtcagggacggtgagcattttttcatgtgttttttggctgcataaatgtcttcttttgagaagtgtctgttcatgtcctttgcccactttttgatggggttgtttgtttttttcttgtaaatttgtttgagtacattgtagattctggatattagccctttgtcagatgagtaggttgcgaaaattttctcccattttgtaggttgcctgttcactctgatggtagtttcttttgctgtgcagaaactctttagtttaattagatcccatttgtcaattttggcttttccaacaagactttttagccttacatttttttcccactattcgctcccacccatcctgcattccagatagatagaacttcttatggcttcccgaacatcccatgatctttcctatcccactgtctttacttgtggttttccttctgctgggacacctcccctgtggccgggtctagcaaaaccattcattctttaatctatcacctccccttatggttactgctcacatgtctatctctcctcacccactaaaccctggctgggatctttgggactccaggaacttacagggtgcctagcaagtagcaggtgtttttttggtgtgtgtgtgtgtgtgtgttggtgtgtgtgtgtgtgtgtgtgtgtgtgtgtgtgtgtgtgtgtgttttgagatggagtcttgctctgtcgcccaggctagaatgcagtggcctgatctccgctcactgcaacatctgcctcctgggttcaagcgattctcctgcctcagcctcctgattaggtgggattacaggcgcgtgccaccacgcccgactaattttttgtatttttagtagagatgtggttttaccacgttagccaggatgatctcgatcttctgacctcgtgatccactcaccttcacatcccaaagtgctgggattacaggcgtgagccaccgggtccggcccaagtagcaggtatttattagaggtttgttgaatgaatgaataagggcgcgttgtgttgaatgaaatggaggttgtgaccgcttaactccctcttgtcaccttcacctttctgcgtatattaaaagatttatctaacctggaataacaaatgcccatcctggcatagcagaaagatgggtattttaaaaagagagagagttttgttacctttcaagcatagcaggtttttgaaagctaagatataaataggtactaataaggaaaatgggaaaactaatgcaaaattacagattgtattagtcctgattgtataataatgaatcataaataaaggaccataaacattccagaattatccagtgagcccagaagttgaagccatgctgatagaataattttttgagtcttgggtttgaaaaatatactgactttttaattaaaaaaaaactttgaaattttttttgctgttaagtaaaacctgaaacttggtagagaaagatgtaattggggcttctaccttttgaggatcatggaaactgtattcaaattattacaattctggattagcatccctagatgagaaggtttgatattatataataactcactgtgacagggcagagtctggcataggtgggcccattgtgtgccatccaaatgcatttaattactgcaggatgagcccataggttttatatcatatgcctgttgcaactgatgggaaggtagcacttcttagactgttggttgagaaggattctgaagctccctctgggctcaacattatggtaccatgattaattaatgattgattagtgaagtgtgctgtgaacacgtgtagggaagattcatgtattttgccaccttatctaacatatcccagaagcagtggtataatactaatcagtgtgatatatgacagaaatatgggacttattcagaagcttgaatttaagattcaattgcatcacttactgttttgtgaccctgaacgaaccatgttctgtctctgagcttcagtttcttcataggtagatgggagttgaaaaaaaaaacaccttatttgtcatatggaggttagatgagacagagttactttatacacattagtgcctagcttttctaatcaggcttatgagatcattgctgtatgcagtcagtacttacttgtttgctccgtgcatgttacatatgatggtttctgtgcgtattgcctgttttccattctcagctcacagcacaggaagctttgctggctcactgactttgcacacccactagcctagggctctcaccagagcacctcccacctctttggttctctgcggtgacgtccttcagcataggcagttaacaccgaagcagacgaggctgaagtacatcgtggtgcttataggcttggaagttccattctacttaacttactatgttaagtgctcgtagtaaatttggagctaagacttggacttaagtttccttagctgcctcaggactgcgtctctagaacgtcatagagtttaagccttggccaggaaaactgggatgacagttctattctatgtgtctcatcctctaggaggcgagcgtgggcatgttctcatggcaaaggagcaagagtgagcaagcagaaaatatgaaaatgcttttcaggcctctgctggtgtcatttttgctaatatgccattcagcgaaagcaagtcacatgtctgagcttagtgtccagggctgggctcagtgatgttaaattgccaagggtatggagatggggagagtgaagaatttgagacattaatacaatcaaacccaatcaaaccactacacaacattatgggagaaatcgctgaattttctttcttttttttttttttttttgagacagagtctcactctgtcgcccaggctggagtgtaatgcgtgatctccgctcactgtaacctccgcctcccaggttcaagcgattctcctgtctcagcctcctatgtagctaggattacaggcgcctgccactacacccagataattttggcatttttactagagatggggtttcaccatgttagcagggggatctcgaactcctgacctcaagtgatctgcctgctttggcctcccaaagtgctgggtttacaggcgtgagcaactgtgcccggctagatctctaaaatcatagcgtgagtaaggtgaacagaaaaatagtaatgatgataatggtcatggctaacatttactgaatgcttgttatctaccagtctgtgctgggagcctattgcattttattccatactgaatcctcacaatacccctttcatgtaagtgctaatattacctctcgcattttacaaatgagaacactgaggttcagggagattaggtaattgtcagaggttacaaagctcctcagtggtagagctctggaataagaatccagttttatctgactctagtctagctcttaactgaatcccagaataccagaaccttggggcagggacaccccttgaaatgtactacaggggaatctagggcaaacaatgagcaactccctttcatgcggacggtgataacctcaaggaatgtgtcccccaaatgagtatttactgatggttccctcatgctcagatgtgtgaggttggcaaaagttataagactcagtaaaaaggaaatgagtaaaaaggaaaaatgagtaaaaaggaaaaatctgttcaagaatttttttgcacatttgtgcaaatgacagctcctctgtggctttttgaggggaaagtaggagattctagggatggtcccttaaatgttgaggttggtataggtgcagtggttttgaaactgttctttgggactctgtagagtttcacactataaaatcttgatgactattgtggccgtcatgggggaggctgggaagcaagattccacctcctacttctgcagagaagctctgcttttaactgtcttatgttttggggtttacttctttttttttttttcaatcagagtcttgtggcttaagaaaggaaagccctgttataatggaaataaacccggtcaaagggtcctgatagttgagctgtagtgccacttccgccaccgtccagtcatgtaatcttgcacacttgcttgatgatccctggggttcttctttcttcatctattgaatgaggggcttgggctggcgatcttcactgtcctctccagatctggtattcctcatcttccaggaggggcatctgtgatctattctactgccaggggtgaagttctagaactggtctgctagtgatccgaaccagaatccctcccttgaatccttcaaatttccgtctgcttcccaccttagtccagtcagcaagcacatgtctatgatcgactctgtgccaggcactaaacctaccatcgttctaagctctgcaggtcctaatacttgccctggcctgggagggtctgaagtgtgccctcttgctgtgtcttttctttgccactgtcttccttctttatgcctcacatgtttatgtcttcctacaggacacagtgtgagggttggtagcaccatatactctctaggggttggcagtggaggggataataagtggggacctaaggatgttgcaacagatgggctcactgggtcactgttccctctccagttctcttcagccattgacaaggatgctaagttcatctgaccaaagtgcttttccaatgtagatccctttatttttatttattttgtatttttcttgagacagggtttccctctgtcacccaggctagagtgcagtggcacgatctcggctcactgcaacctccgcctcctgaactcaagtgatcctcccgcctcagcttcccaagtagctggaactacaggcatgagccaccacacctgactaatttttgtatttttagtagagacaaggtttcaccatgttgtccaggctggtctcaaactcctgagctcaagcaatctgcccgtcttggcctcctagatcccttctagccacctctgtctctgtctctgtctctgtctgtctctctctctctctctctctctggcagtgacttcctcagcaaagggcagaattgaagtctagttgtttgtcgggaggacctgcatcttttattcttctttcctaggtgatggagaggctggggtgacatggaggggtacagttcctatggaaggagagaaggctggggaatgctagctgtgtcaggcactaaacctgccatccttctaagctctgcaagtcctaaaacttgtcctagaggagacactggagtgtggggacccagagaagagggagtcagccatgagaaggtttgaagaagggcatttcaggcagtgggaaaagaaattgcaaagactctgaggttgggctgcacttattgagttctgaaaacaccaaggaggtagcatggctggggcacagtgaacaaggggaagaggagtagtagatgagactggaaaggtggctggtgtcagaccgtggccatgtggggtctcaaaggccacagggaggactttggatttcattctgagtatgttgaaaaccactggagggtcttggatgagggagtgatgacttccattttaaaaggtcattctgactgctgtatggaaaatattccataaggagcaaaggtggaagcagggatacctgttgggagaaccgtatatagtccaagagaaaaagaaacactggtgtagtagaattgataggagtgcagcttacggcctcccctgtgaggtcttgggatgcagggccaaacctggaacatcctgtcaacgggtaaggaaaccctggggagcctgaaggtagaggaggagagatggtagattgggtgaggggcatcacataaactctggagctagacccagttctgcggttattcattcattcattcaacatatggtatccatattctttttctcccccagagaatagattttctttagtccttgaggactcagcttcttacagggactttggcagaggtcaggggtgtagtgccttggctctaaattggggtgagggtgtttggtccttctaggcatcacagtgattcctgactacttgctatgaatggcactactcatgtagtaatgttgtttcacatacagcttgggaggcacaaaagccttgaagatacatgattcatgcatgtcctgatggctgcagtctctgctgtattttggatgatgagcttcttaatggccttgtccttggctacacatagggccaaattcatgcaataaataggctgaatatggctgtggtcctttttgccatgactgttgttccttctcctcattgtcattttggaagtgaggagctgagatctgcacccttattagcatatgactttggaaaaatgacttcattttccagaggcctcagtttactcatctccaaaatagggataataatagttcctacatcatagaggttttgtaaggattaaatgacttcacgtgtaccatacttggcatagcgcgttgcccagagcaagtgtattatgagtgtttgctgttgctgctgtgttgtaaggtgtgtgtgctggaagaactgtgtagcagcctttccactggctttccaaaatcacaaaaggaccaaattgtcatgggtctgggtcctgagcacactgatctacactgtcccctttctaggggctgtgtgtcatctgctcctggctcccaggctcagccttcacccccattgtaacccttcctggaaataccttttgtgggcacattgctgcccctgcttcctgccccctggcatcacattgctctgcaggaggtgtggtctgtgcctcatacctgtgaggtgtgcccggtagatggggctgtgccaggccccacattcaccctgtggtgaagctgggggctgtctggtctgggttcacacagttcaaatctgtccagagcctttgccagtttgttctgttctcctcaccagctctggcacctcttgctccattaatggagaatttgtcaagtaatgggaataattagcacagtgggggctttactgtgtcctggaaagagaacagagagagccctcccagcagccccagacatgattgctgggcaggcttattttctcttgtctgcgcctctctccccttctcttacatgtgtttgatttttttccccctctttgtgtggagagagttggctaggagaaaagactcgtaaattgcactcttgctgggctggtgctgcgaaagctggataagattgtcctctagggctgaataattttcctctccccttacccgctttgtggggaaagatcagctaagcacctagttcattttcccctccttttccctctccattttttctctctcccccagccctccctgcttctcttccctatcccctcatgtaaagaattcactggctttcaattgaatcttttttaatggtcccaagaggggaggatcttgaagggtgattatcttcattataaattattaactctcccagcagccagatggctttccaaaccatggctgggaactccaggctggggaggcccactggccagggaggagggggtgagagaagggaggaggctgaaaagtaaatggccacagcttcttgggttcctggctgtactgaggttgctcgggagcctgttggcaccttacaaggcctgagttctttggtgtgtgagagaagagtttgttgttgttgttggttttcacccactagagaactcagggtgcaacaactaggctaccttggggatggagtataggtagtaggtggaaaagagactgttgccatgagttgcttttggtatgaaccttagaagattgtcaaggcatggtaagagggcatgattatttctgtcctttgtgtagtctttgatgtgcacatcctggaaggtgtattcattgttcttcccaatttataggagaagaataaaaaattgaatagatccagaggtatccatatggttgcttggccaatagttagtgaaaagacagtctggttctgacttccaatctagtggtctttccctgacatcagatttctcttccgcagttgcttatgccctacttgtccttcaagtttccttgcaggttcctctcctctgagaaacctctgaccgcaccagccctgagtcatcttgttcctctggattgtattgtattccatgtatagacctacttagtactggacatagaacccctaaagatgtccagtctcttctgggtcatccccagtaacagggagcctgcttcatttggaggtaatctgcttctaagataaagacataaatactctctgtagaacttccgttcactagacaaaattctatcctggagggcaatagagaaaccgtgggatcttttttccaatttaagtatgcttcaaaaaaaaaaaaaaaaaaagaatgcttcctactcctgtggacactgctcctgccactgctgcattgcctgtgttagcccaaacaccctgacacctccaaaaatttctcctatagagactcatgtatgactctccacattgtctgtgacactggaatgaaatttaaagaagtccatctacccagcctattctccctaagcagtccctgtgatatggcttagctgtgtccccacccaaatctcatcttgaattgtagctcccataattcccacatgtcatgggagggacctagtggaaagtaattgaatcatgggggcagatctttcccaagctgttctcctgatagtgagtaggtctcatgagatatgatggttttataaagaggagttcccctgcacaaggtttctcttgcctgccccaatgtaagatgtccctttgctcttctttcatcttctgccatgattgtgaggcttctccagccatgagtccattaaacttctttcctttataaattacccagtctcaggtatgtctctattagcagcttgagaatggactaatacatcccatgagacaccaacattagccatgctgctagcatgaaataataagcatcaaggacaacagtggacagcaacagtagataacatttatttggtacttatctgtgctgagcattgtcctaagggctttcacttgtactaagtgcctacgtatgataattcattgttatcatctgtttcacagagaagacaacggaggcatggagtggataagtgatgggctcaaggtcacataggcatcaagtagcaggtctgagatttgaacccaggaagtctggctctagagcccatgcctttaaccactacattatcccgcctgcatgagaggggcactcatcctagcaccagtcttctactttggaccctagaggctaaccatcaccatatcaagcccacacttggcagagtctgcttctcacatttggtccacctccttatattatttaggctcatgtctttcctttctactaacatataagtgcctttcagggcttgagctatttttatttatttatctgtatgtctggaacatgggtgctccatggttaaacaaaataaatgaaaaactttcttttcattcactatctttcagcttacctacacctttctcagagtatgactcagaataaaaattcagtgactggtcagattgacacagatgatgatctctttcttcctataagttatatttcaattaacatagtctaaaattacatttgattatctggcagccacaaatgcttttatatatatatatatatatatatatatatgtgtatatatatatgtgtgtgtgtgtgtgtgtgtctttttgtcaatttaatttctcaattcttgtttactatatagttacaaattgtaccttccatccttatgggttgtttatattggaggatcaagttgcattcctttccatttatctccatcaaattttgtcttattagatataggctgtagttttagcctatcatgatctcttggagtcccttcagcctcacctggcacactcataactctcagtgtcagttcatctacacacatgattatttggctctctccatcttcactggggctcttgataaacatgaaagatgagatcaggcctgacctcccacaagagcctgtgtcctaatgggtttgcgccttctttgaatgctgttctttagccagtgaccagtcttcttggtctgtctgcctcacagttctcatatcatgagaagatctgctgaagtccatatataactcatgtgtatctctaccataacagatcagtattcttgacagaaaaggaatttaggttagcctgacatgacttcttagttcttgggaaaacttagtttttagtaaaaaaaaaaaaaagtgttatagttaaaggttaaaaaaaaagtctcttcctgtctctccccatctccattccgctttcagcacaatataaacttcaaatgctcttttctatgtgtccatttgttaagaacagaattaaggtccttggaggctgtttccccttctttttcctaaagggtaaggcttggtgactaagactaggatcagctccgcagatttcaggaaaagaagagaagatgcaagaagggtggtattcctagacatgaccaaattatgggagagaggactagggtatagagtgggctcaaaagagaggacagtgagcttcctattgcaaagcatggtggatatttgcccttagttttctagaagagaggttggttttgacttggggaactgtaagaaggaagttccagcctacaaaacaggaactagtaataattttctttaaaacccttcttcaagtgacataacaaaaataatagattaacatatatatgtatcaggaagtgcattaagttgcttttattgaaatatagcatacatagagaaaagcacatacattgtaagtatacagctcccttgttgcattttcacaaactgaacacattacgcagaatcacccagatcaagaaacaggattccttcacccctttgccttcttctaatcattaaccactattctgacatttaacagcatagaataaataattttgcctcttttcggtttacataaatgaagcacatacagtatgtgtcttactttgctcaatattatgtatgtgagattcatccacgcttctgtcgagatgaagagcaatcattctcaaagctgtatagtattttgcatgaatagactacaatttatccactctactgcaggtagacattgggtgattttctaggttttgtctattatgaatagtgttgccatgaacattctcatgcatattttcagttggacatttgtaagcatttctgttcgtgtatacctaaaagggtaattgtggagtcctggggtaaaaatgttcagctttagtagatactgccagcataattttccaaaagtagttacatttttataaatttttaaatttcatgaagttcaaaactgccctatgagataggtattattccccccccccttttttttgatgaagaaagactcaagagagttgcccaaggttaaatagctataggaatgagagtctgggtttaaattcagctgtgcctgcctccaaagcccatgttctctctcactagcctgaactacttttatatctttgagagaattcatgccttaacctccctcactacatgcagtagagcctttgctgttgtattaagatagatagtgctgactatgtgagcttgccctaatggtgtggtgtctggaggggtacagtttaattgagggagcacatttctgaggttcttgtataagaacaagcctctgtccacctgcaaaacacacaagaagagaaacaagcccatatcctatgcctttgttcaagtgcatgggcaaatgggtgtggagagcattgatggcaaaggtgggtaagacatgaggctcaggttacagggagttctgggtgtaggtggccatatgagatggaagcttctgctagtttgtcagtgacaacagttttttatggtccagtattaggagtgtatgagtcaggactcttggtcacaacccaactcaaacttgctaaaggaaaaaaagttttggttcatgaaatggaagtcacaggattcattgggctttaggtctggctagatctaggtgttaacaccactagaaatctgtttgtatctatttcttggctctgatttcttccttgttgttttcattattagacaaaatcctctccaatggtggagatggatcatactccaccagtaatgatggtgtctgtcaagtttgagcttcactctaataatttgttgatgtggtaagaagagagaggggatccttttcacgataattccagtgaaagtcccggcattaactcaaattcaacttcaagtctgggtgagagacccatcttgaaactaatcactgtggccaagagattggaatgtcccagttgactaaactggatcatatgatttgggattgggatgaacctcaccttgaatgacacagaacgagattggtggtgaaaatcatttacctgcaaagtggggtgaggggagcagtgaacatggggcaaaaccaccagagagccactggagagattttccagtcctggtgagggcaggtcataggaagcttctggaagaaaacctggtaagccccacctggggactgtgggatgcccgcaaaggctgggcacaaggacagtcatcatcgtgacttcctaaatcaaacccacttgtagacagtccgacttccttgagtctgtctcaagctcagctaaagctccaggcagttggaaaagggaggaatgaaattggaaggaggggtggggagggcaaatggcagccagatcttctgagccacaccttgtggcaaatagcccacatgtcagagttgtgtgagccccccccaccacaccaccctgccccctcctaagcagccggcttatgagacatttgcaaagatgttaaccccacataaaaagtgtgccgttcgataattatgtaaattagctgacaattagataatgtcactcactttccctctctcgcttgattcccacacaacagagaagtgttctgagcttctgcaccagcccgggccctgcatgcaggctctggggcaaaccacctgtgtgcgtggctgcctgcgttctcctatggttcagtagagggtggcagttgtctggccaggtgaagagggctccctggctcccgttttgccatttcttgagtctagcatgccccaccagaggggcaaagaaggctgaaggataaacgctggcagcagttggaggcctgcgatatttagtgtaagggcatctctagcttttggccattttggcaatttcccagaggctgcaggaatgtccaaaactaggaatgaaaaggaagggctgtaggaaagaatgtggatagaccatagagggttaagtctacataagcccacttgtgatgttatcacttctgaaactggattctgcctgtgggaaagaaagcttgggtttcctcagtcagcctttttgatcccccacaatgcagggcagggaatggtggtatcccccagtgctggtctgggctggaggggaaggatgagggactgaaggaatggggaggctcagcctggaaggggtgtgtggccccgacaaagcaggctaagtgcccatgatcttcccccacaagggaatgtttctgggcagcagagtttttcattcatgggtttcctcaggtcactaagcatgtgctgctttgctcattggggtcatgtgaggttggcatccagagaggcatgggggttcaggattgatgtccttgtgtaaagtggggttgtgtggaggccactgcatggaacagaagtcaaataatccacaggaacattcttccacttctgcttttactgttcattctatctacaagtgcttcccaaactccagctccatgacgaggccctgtggcagacaccgtgttgaagcagtcattgcctccagggagccccccatcagcaatctggttccagagcctgggctcttaattgccgtgctttactgtctctgaagtaaacttgtcccccactagtttgtgatgccctggagggtgagattggtgtctttattttgctttgatccagtagtgcctggaatgaattggagctcaataaacagttgaattgaagggttttctctttcctttgagatgttgccctttgacttggttggcatacctcacctcatacaaggaatcatattcttagaaattgtgtcacgtttcatgtcctaccctcctgttatccatgtccggcttcatgtcttccactcactccgctccaacagcacctacctcctgctgttcttcaagtataccagcttgctccagcctcagttcttttacattgactattatttctggaacattcttcccagatacttacatggctgattccctcacactctttcaagtcttttcttttctttctttctttttttttgagacagagtcttgttctgttggaacaagtggatggagtacagtggcacgatcttggctcactgcaaactctgcatcccaggttccagcaattctccctgcctcagcctctcgagtagctgggatcacagtcgcctgccactgggactaatttttgtatttttagtagagatggggtttcgccacattggccagactggtcttgaactcctgacctcaggtgatccacccacctcggcctcccaaagtgctgggattacaggcgcaagccaccgtgcatagcctcaagtctttacttaaatttcaccttctcaaatactctttgtggtgtttgccttttttctggggtgtaaatactccttgcctgtttatttcatgctaccaaagtcatgccaaccagtcaaagtttttgaaattttagcagttggctctcacaagcctgtatgagttggcaccagcatactcctgtgtccatgtctcagctgagcatcccttgaaccactgggggtacctgtgtgtatggtaaaagcacttgataacaataacttgagcataccctgagaatgaccctgcatggcagatgcacttgaatgtgtgtgtcctacgctagggaacctgggagtggccaaccaggagattcattccttctctatgaggaacatataagcccctggctggtcccatggaacatgggctatacaggggatcaaggccctttgttttagggtaaatgaaggttgccagatagggactgttatggggagggtgctaagtaaatatgctgtgtaaactgcatgccttttgcaagcagttgcagctctcctacccagctcaccaccactggactctctcctctggatgtaagctccccgttaaaacccatttctcatttgtcagctctgggattattcttctgcctcttgaacctggtaccttccttatcggagtctatggaagtttggcacagcacctgtgccacactttagggaacattgcttggacaaagccttttatagaacaaagcctttccttataatggatttaatcagccccttgttcgttgggtttgtttgttcattgggaataggtgtttgttcctggttaaggaacagcagcttcctcttcaaagaaggggtaataactagctttgctgatgtggttatcattaaaataggggatagtaatgttctgatggagcccatggtgaattatcaaatgtgccaggtaataagcagcaacttgcacagctcctagaaatcacactcactgtttgatctgaacagagaactcaggcgggccagagtctgccctcagaaaccagactgcgtgctggtgcatttctaactgtttctacatcatcataaaatatatgtaatatactctaggtcatttggaactatccagtgtcactctaggaatttcttaactattcagttgtcatccattctgcagttttcataatctttttcagtacttttgtttttacacattgctcactctatagccatacatacatccacacatacacagacatacacaaataacccctcctcctgtcccttcccacttcagagataaaggaagagacctaggatttgttgtcacctcctatgtataaagcctcatgtggccagcagctgtggctcatgcctgtaatcccagcactttgggaggcctagatggggagatcagaagtttgagaccagcctgggcaacatgatgaaactccgtctctactaaaaatacaaaaattagctgtgcatggtggtacatgcctgtaatcccagctacttgggaggctgaggcaggagaattgcttgaacccaagaggtggaggttgcagtgagccgagctcacgccactgcattctagcctgggcaaaagagcaagactctgtctcgaaaaaaaaaaaaaggcttatgctaggatcttcctatacctgatttcattgattcctctcttcaatcttgggaagaggctattattttctctactttacaaatgaggaaatagaagctcaaataggttaagaaattttctcaaagtgccacatacaggagctaggattcaaactcagccttttttttttagaaggaataaaataatcctcctctcttaatattcagtaagagaggaggattattttactcattactcaccttccagtttattttcactgatttttataaacatttctttcacaaatttaggggtagcaatttgccttaggcttcctacagtgagttgtcaaattgaaaaggaaaaatctagaaaaaagttaatgtcatttgcaagcttttaataggtaaataagtaaaaattaggtgtgggtatttgaatatataaaatgttagcacttatcttaaaaatacactttgacaatgtgaccttgtgatgtgaatattctaataatgtgctgatatggctttggggatttttattatttttacatatggaaaacctgagtgcatcattaggacctggtcgtcttgtagtggctctggaagaacccacggcctccctcctgtttgaagcactaagcactgtagcaatcactagaatagcttggctcgaagtcagcattccatcaatacttgtgaaataggatgcaatgttttcctgatatatggtcctaatcttcctctccttctccctccccctcttcccacaggtcttttctctggagtcctgggaggcaagttatgggcagcactgcttctggccgcaccatgaagcctgagtctgcttgcgctctgcccagggccctgctctgtctgagcattgggcttctagctgcccccctccccacagcctgccgctgctaggaggtagaactttaggagtggtccttggcctgtttctacctgtcacctggctcacctcaccactcactcctcctccatcacagcaccccggccctccctgtccctggcctccctggctggggcatttgggggtccgctgggaggagtgcatcgctgaaggcttcttcctactctcctgcaccttctcctccttgagtcaaggcctccggatccacatggatagctgagatcttttcttggagaaagacgctttcctctttactccagtccctcacttccccacctgattttcctcctcttctgctggtcctgtctttttctactgcctctttattcaatttcttgcttgtgtgcccctctgggactctcttgtacactttcctccatctccactatctcaggatctgtgtgtgtgctgccttcctcctgtgtgctttctgtccccccatctctgtcttgtctttcccacttctattgccaaagggagagatcctctccgggctgttccctggcctgtctgctcctccgggctctgtcccagcagcgacaatgagctccacactccactcggttttcttcaccctgaaggtcagcatcctgctggggtccctgctggggctctgcctgggccttgagttcatgggcctccccaaccagtgggcccgctacctccgctgggatgccagcacacgcagtgacctgagtttccagttcaagaccaacgtctctacggggctgctcctctacctggatgatggcggcgtctgcgacttcctatgcctctccctggtggatggccgcgttcagctccgcttcagcatggactgtgccgagactgccgtgctgtccaacaagcaggtgaatgacagcagctggcacttcctcatggtgagccgtgaccgcctgcgcacggtgctgatgcttgatggcgagggccagtctggggagctgcagccccagcggccctacatggatgtggtcagtgacttgttccttggtggagtccctactgacatacgaccttctgccctgacccttgatggagttcaggccatgcccggcttcaaggggttaattctggatctcaagtatggaaactcggagcctcggcttctggggagccggggtgtccagatggatgccgagggaccctgtggtgagcgtccctgtgaaaatggtgggatctgctttctcctggacggccaccccacctgtgactgttctaccactggctatggtggcaagctctgctcagaaggtaagaccctctccctctcttgctagagacccacccacgggatggctgaggctggggctcctgatacaaaccagttctatatggatgcatatctttagctgcatgttagatcactgggccccttgccctaaggaggcagtggaaatcctttgcctactcttaatggagaatctgtcagatctcagcaggagtagaatcctgacccctgaaccctgggctctgtaccctactcagagggttagatgaagtaggctgcagggtctgccccagcttggcccctctcactgcagcaccgtttatcacagtcaacccagggcaagaaatcagatagaaattgggaatttcggctaggcaaggtggctcacacctgtaatcctagcactttgggaggccgaagcgggcagatcacttgaggtcaggagttggagaccagcctggccaacatgatgaaaccctgtctctactaaaaatacaaaaattagctgggcatggtggcgcacgcctgtagtcacagctactcgcaaggctgaggcaggataatcgctctaacctgggaggtggaggttgcagtgagctgagaatgcaccactgcactccagcctgggtgacagagtgagactgtctcaaaaaagaaaaaaaaaaaaaagaaaagaaattggcaaatttctacctgtgtctctcctgagcccttgaggtttggacccttagggatagctgggaaactccccatcacttcctcttaatcatccctcacataaagaatgcctgtgcaaagaaaaatgaacccagttcttctattggggcccaccccacctcccaaccctctgggaggtgtctagaaggtggatgaggcatctgcgccaggcccttcttacctttttgtttttggcaatgaggatttctcacatgaggtacctctttagatgtggttccctttcccatcctctccatgtactgagaacattgcaaagaggcacagagattgactgcagtgttgttcagccaagcctccaagggagctgagagtatacagcatagcctggagaacctcccaggttcaaccgtgacttcccagggagaagcagggaggcacagaggcttaggttgccctcccttgctcaccaaatctgactgtttggggttagatctaagagaggtggctcaaactttaacttgacaaatacttaaaatccaaattcctggacttactcacggcttagatttgggtagcaggaactgctgacatgagaagctgagaaccaaccatacaggtatgtatgttgagaggttagggtgacaggaggcaaggaagtcacatttccttctatccttttaggattaagccctggtttctcttagacgggttttatgttgccatcccctactggtctcttcgtggaggtggtgtaaggtatagggcagaacagtggttctcaatttagctgcatgttaagattgtcttgggggaatttaaactccagaccacaccccaggctaattaaatcagaatctcttggcatgggatccaagcatttgtatgtttttaaagctctccacataattcctgtgcacaatcaaggttaaggactaactagtacaagatcaagggaggccagatggctggtgccaggtgggtggtgccaggtgggtgtggccaggtgagtgccttgccaccgattcccaagatctcttcattcagataaggccctgctattgggatgtgtaattaaagactgcaggtgttccttaagtgtttccagaacatcccaacccctaaagcaggttgtgcttgatgtgaaccttagctatcagtggctatttaagaatatttaaaaaaattaaaacaaaatttatttcccaggtggtacctgctggagactggaacatatcagaggtcttgtcatgcatgggctattgcaggagctgcctgggtctccactcctttcttctaatgggttgggcatcacaactttctcccttcctgtgggtgggctgtcagagctggagatgccaggcatatatatcgtccttatttggcttctgtttttcctccactgaacccactgggagaaggggtggggaagaggcaaccccagtctacaaaccattttgggaatgtggttattgaagtgcttctcacaagcaggtgccttctggagctgactgctgttccagagcttcttggctttggagaaagttctgcctgaagacgctgacatgatcacttgttttctcattcgcccaaaggatctgttctgttctcaaaacttgtattgaaagctggcattcttcctttctagggaccagggtgtttgcaagtgtgttgttagcttgctgattatccctgattgcatttttgtgtttaaaaagaactcatttccttggggcaggtttggatcagcacttttccgcaggaaaaaaaatctctatactgtatatgtatacaatttgcttttctcttctttttctttttatattttgtgtgtgttccagctcccagtggaatttcttcagagcagattgtgtgccattggttttttaatagctaaatgcaatatgtatattttaataattgtttttttttcctacaaggttcagatcatctcctggctacggattgatacccctatctgtagaaggcaaacacacatcctaactcatttattctccccatacataaatagagtaaataaactgccgtaacagtaacacttggctggcttggaacagagcagtgcaaaggttgaggtgagagaggatgttgcgggaggtaacagaatctactgttgattacttggagcctgttgatcctggtaattgtcatcaagtctaatcaatcacaaaaatgcatcacagactattagaaaataaccgttgcctccacacatagttaatttttagaaagtaagcagaaaaagtcacctgtaaaatgtgaagggaaaggaaatcacagcagctgctaagtgtcaaatagatctacacaaaacaagataatgtctgcccatttttccaaagataatgtggtgaagtgggtagagagaaatgcatccattctccccacccaacctctgctaaattgtccatgtcacagtactgagaccagggggcttattcccagcgggcagaatgtgcaccaagcacctcttgtctcaatttgcagtctaggccctgctatttgatggtgtgaaggcttgcacctggcatggaaggtccgttttgtacttcttgctttagcagttcaaagagcagggagagctgcgagggcctctgcagcttcagatggatgtggtcagcttgttggaggcgccttctgtggtccattatctccagcccccctgcggtgttgctgtttgcttggcttgtctggctctccatgccttgttggctccaaaatgtcatcatgctgcaccccaggaagaatgtgcaggcccatctcttttatgtgctttgggctattttgattccccgttgggtatattccctaggtaagacccagaagacacaggaggtagttgctttgggagagtttggacctatgggtatgaggtaatagacacagtatcttctctttcatttggtgagactgttagctctggccgcggactgaattccacacagctcacttgggaaaactttattccaaaacatagtcacattgaacattgtggagaatgagggacagagaagaggccctagatttgtacatctgggtgttatgtctataaatagaatgctttggtggtcaactagacttgttcatgttgacatttagtcttgccttttcggtggtgatttaaaaattatgtatatcttgtttggaatatagtggagctatggtgtggcattttcatctggctttttgtttagctcagcccgtcctgttatgggcagccttgaagctcagtagctaatgaagaggtatcctcactccctccagagagcggtcccctcacggctcattgagagtttgtcagcaccttgaaatgagtttaaacttgtttatttttaaaacattcttggttatgaatgtgcctatattgaattactgaacaaccttatggttgtgaagaattgatttggtgctaaggtgtataaatttcaggaccagtgtctctgaagagttcatttagcatgaagtcagcctgtggcaggttgggtggagccagggaacaatggagaagctttcatgggtggatctctactccaaatctacctatgtcacatatcactcatgccatcacattttacgttgattcagtagagggaaaaggttctagtctactgacaaagaaaaagttgattacttgtcttctgtcttctcctgtggacttgagtgggtgcccagaccagaagcggtttgtctcgatacttagctgttatgttttcaagtgttggaatcctctagtgaagtgtcgtggtgggtgttggtgatagggaccacagccttattataagcacaccgttgtgtggtcctcagtagtgactagccaccgccccccgccccccccccccccacccgccacctcctgttgtctgaagctcagatcctactcaggtcagtttgactgatggctcaacaccactgtgtggccttcgcatgccttcctgaaagtgaatttcaatttctttttttttttattgagaatttatgactcttgccccatctctcaaagccaagactaggatggaatggcatataccaagaggaggctgcttatccctgagcatttactgaggtccagagacatcagatactgtagtgaagggaccagtggttgcctcagttggatcctcctgttttgggcacttgtgtaagaacccggtcatttcctctccctctccacagtgcacatgctgcttgaattataacatggcattgttcccaatctgtgtcagctctgaatggctttgagaaggggtgggtgtcctgcagggaagtggagcataatcagagagtaaaggattactcctttctaagtcttccctggtttgggaaggagagaacagaagcagggccttaaaatgtacacaaaggagggactgctgcttctgagacttgattccccacccagcattcaggttttccatgggaccagcctgactctccaccagcccagccagcaggggctgtcactaaacggagcctgaataggggtctgattgctcctttttcctcctttcctcctgattaccaagtgagatttcctgggtatactgtatgctaaatggcagagcagccgcctgccacttgcttcaattatccctcttttaactgctgagggaaaagcaattttttaaaatctcccccctcccctaacatctctgcctcctttaatgaaataagacccttcttccatgttcccccttcaatgaggtgaaagcagccttctccttttgcagaaaccgcccaccagctgcaggctgcaaagagggtgggcagtggataatgctttggtccaaattcagcaaggctgagggtcaggcagacattttgccaggagcctcagagtagcacgtgaacttgcatttgcatttggtaatgagataccacaggaccgatgccgggggctaattattttcaagacccctatctccatttgcaggctgctccagaaagatggtttccagtttctggggcagctgtccttcagctgggtcctctttctccttcacagggcagatgaggtggggtgtgtgttgcaggctgcacttgggggatgggactaccatgaccccctttacttgcagtcactggctccatagtatgggtccatcacagtgaggccccagaggcagagctagagtaagggaggctttagggcagggctccaaaggtcgagtgcccttccttacacaaaataataatgatattattaccattgctcttattaaataccaccctgcgcctgacattctaggtgctttttatattcattggctcatctatttctcacaaaactcctatgaagttaataccattagctccattttacggatgaggaaaccgaggaaccgagaaattgggaacttgaaccccccgtttggcatagtggataagagtatggctgctggagggaaaacgatccggacttaaatttgggcttgtctacttacatgttgtatggctctggagaaggtttttgaagcttcagtatcttctttagtaacaatgatagctaataatcacagagcactggctccaggctcacactgtcttaggtgcttttcatgcactagctcttgaaaccctcgcaaccactcttgacatgcgattatgattctcatttttttggataaggaagctcggggcaagaggttaaataacttgcccaagattgtgcaggtattaagaggcagagctgcaatttgtgtctagacagtctggcttcagagcctacactgtcaaccaccatgctatcttgactctcagtgaaacaggaatcataaaaaatcgtacatcatggagttgttgaaaggatttaatgagataaaacatgaagttatctgcctagactccaggaaagagcaagttctgactctgggctattggtttcctggcctgtgtaagaacaaactgcacatcaatttggtttcacaggagatttgatgcttccttttgagcgacccctacctccaccagtttcccttatcccagtctgaaaggtggtagagataaaaggaggggaattttggaagtgtacagaatccaatttcattccatttgctcctgcccaagagcatggggctgctgacaatggttatgactgcgggatgggattcagggctctgccggcaaacgtgtggtgttctggcctcagcagccacccagtgaggcaggtagggcaggccttagcatcccactgaatagatgagacccagaccctgaacgtgtcatgggtgcaagggtatgagggcaagtgtgggtgctgcctttgggcagccatctctaggacctgagagcccaggccctcaatgtggcattttacctctgcttctgggctccctcaataaactcaaatggcctgtgtctctgtcgtgagatggagcattgcctccctggatgcggatgataagcaaaatgtcaagttcctggtgcaggaggttatcagcttggcctgtctcaggggctttgttccttctagccagagagagagagagagagagagagagggagaataggaaagaaaatgaaaatgaatgaatatgagtatagtattcaattcccagcctcaaaactctggttttagtgaagtgactgggattggacccaaggctccggaggtagttggagcacaggtgcaccacaccggagcttcgctggacaggatgacctcttcaaacttacctttggtttcccaggtaccaggcaatgcccattacctcactcagggttggtggtgagagttggagctcctggattcctctgtcaaactcctcctaactttcctgccttcagcttctctctgcatgtaaaaaaaaacaatctttctctgtttcttcttgtctattcctttgtgtgtgtgagagggggagatgattacagaggtggatttaccatgaaactaagcctttcgtacattctcagttgcacgggtcccttctaagtctccacacctaattttgtatttgcaatttctttttcttaaggactcccaaatatcataagcaacaggtcccacctctgtggatccgcctctgttaacacaacttgttgctgtccgtgacagcaatgttgctctgggtgtatgtgtgatttcatttttttcttctaaccagtgaccattcatcacagacacattttctacttcataaccaccataggtggacgaatcagagctagggagtacaggagggtgcagggaatataggaatgtcatttgggaaggtgtggtgggaagaggagatgtctaggatatccactgggaaaagggaggaaatgtttggaaatatttgcagtagatttagaggaacaaggtggtatttagacagagggatcactctagtcatcctcctgagggttttttccctgctgaagttgggaggtttagtttgctgtggctcacaaggtaagggggagtggggggtttgctgggaactgtgttgcaggtatcaggctgtggctggcagaggaggacaaagtatggctctgcaggcctgtctccctggtctatttgggaactgacattgccagtgggttgtcattattgctgttgttctccagaaattgatgtctttgagtgatctatttaaaaacaatacgggactccctttaaatgtgtcatcgtctatatccgctctcaaaccttgactgtggccacaatgttcctaaataatgtattttccaaagtttttttcttttttttttttttaaatcctggaactggtaccagtagcttttaaaagcaagctgacctcatagtcatccagagaaactacccagttgcactctgtgacaaaacttactttgcatctagtcctagaaattgtgaactctttggctctttgggggaaaaacagtgcaccatccaaaggtatgcaagggcataaagaaggtaaagatgaaagagagggagggacaagaactgtaggcaatgtaaagctcctggctcaagttttctggctgtgaaatgcatataggatccttttggttttactgagagccttatttaagtacggtgtctttgtagctaagaaaatgactctggggagttttcctttaagtttctcgatgagatgctattcatccgatcctctcctgacacttttgcctctgatctgctagcttggttctcttgaagttgttctgtttgcccgtgtgaagtccttagaagacggagtcccaacagtcctgtggttgattgctggtaatgtaggactggtgtctccactgtagcaagcagtacatttcaggcaattctgcaatctctcctccaggtatgattggaaatgtgttgcctgcagctcttggagaatagaaaaagtacagtgagagtgtgtacagcttatttacttaataggttgctttcaaatagaaaggagtacccacttgcgaggagggatacgctggaaagcaaagctgagatcacttctttgtgatccacatcatggggaaagggctggacaggctgggagtttaccacacactcagtttcttccttcctcctcattctctcaggcttcttttctttccagacggggccctgtatcttgcatggttagccttgagagttaagagaatgggaaagagtgggcttgaagggcactgagctctgacctgtggaatccttgaaagacaaatcctcccacagtatgtttgctctgtctgggccagaaaagacaaggctggagtttaggcagaggtgttgtacaatcacatgatgtgctttgactcacggcttagttttaaggaaacacactgaaatttggggagattctggtgttgcaggagaagtctgtgaaggatgaagtgtggatcatgtggccctgttagaggatgctaagacatttattataatgtattactttctagctgtgactttgccctaggtaatgtactggaaaccaaggtacattataaagtatcatgggagtctgggcgctgtggctcacgcctgcaatcccagtactttgggaggctgatgatggaggattgcttgagcccaggagtttgaggcctgcctgggcaacatagcgagacatcatctgtacaaataattaaaaaaattagccaggcaaagtggtgcatgcctgtggtgccagctacttgggaagctgaggtgggaggatcgcttgaacccaggagataaaggctgcagtgagctgaaatcacaccactgtactctagcctgggcaacagagtgagacccatctcagaaaaaaaaagaaaaaaaccaatcatgggataataagtttaaaggggacttcaaaagtcattggatctaagtactcatttctcatcctcctctgcactatataaaatgagcctccccgtgccccgcccccccgcccaaagaaaacctgctagccatctgcaataatgggagcttggtgcttttcaaggcagcctaatgtatctctggtcaatactgagtatcagggagctcttctttatatcagccccagccactttctcattggtcctcattctatttaaagtaatctgacctttgtaatgggccatgtgggtgaagaagatgggtgggttgattctaacagttctgaatgatgcttcgcaggaattaacccttgtgccaaggtaaaattcttaagggattctctaatatggtgctagcagtacacataccactgagttatttagaattaactgcttatgattaatcttaaacagtgtgggagggcttgatgtgggaagagatttgatgtaagcaggtgactcatactccagtcattttgcttctggggagcttgcactgtgaaagattcatggttagccctatctctggctcttttgtcagtgcctcattttatcaacctgtgatgtcccatcttcccccatacccaactaggtttttagcgtctctgaatttccaaggagcttcctggaaatcctgaatttctctgcgacaaaaacatgggggctggggacggtggctcatgcctgtaatcccagcactttgggaggccgaggcaggcagatcacgaggtcaggacatcgaaatcatcctggccaacatggtgaaaccccatctctactaaaaatacaaaaattagctgagtgtggtggcaggcacctgtaatcccagctacttgggaggctgaggcaggagaatcatttgaacccagaggtggaggttgcagtgagccgagatcacgccactgcactccagcctgggtgacagagtgagactccatctccaaaaaaaaaaaaaaagattggaagttctggaatacattggagaagatgaaaaggggattggattagacttgcctaacaagcccatcatggtagccagagtcagacacaccaacagaaataaagatttcgctaaaaggcctagtagtattttttttcttttcttttctttcttttcttttttttaaaagataaggacatgacatgaagcagtattgagtagctgctcctggagacaggccttggaagcacattccctgtgcgaaaatgcttcttactctgccaggttgctctgggtatctcatgtttttggcactgttgggcagaagtctcccagggaaagggcttaggcagggctggaagatcttgctctcacattggcatagactggaagcctgccaagcaaattcgctcctgcaccctaaaggggatgaggctagtcttggccgtcagccatctccccattgacagtcatttacctgacacagcagcagaaaaaaaaaaaaaaaaaaaggaacccgtctcatcattttgtggtttaaaatagtttacttttaagagcaaagcccacagacatcattttgagtccaagcactgaaatggaatgagagtcaccaactcgtctgtggtttcattgtgcagccaggcctcggaccacacgcatgtgctgggaagtgggcgtgaccacctcacaccatcatgtggtcattgccacgtgggcagaggatggttgggttttagttgctgtggaaactttgctatttgctcttcctgatgttgagttttcagccttgtgttaacacagattggggctattttttcctcgtgtagaatatataaccagtggctacattttaatgtgtctcttggctccctttggcttttctatccttaatgcaagttgcgattgctcaactgggtttcctgattcctgtggcaggagtatgtgaggaggtattctctttaggaactgtaagacgtgaaaccaagggtggaggactctgtttcccttagttaatgcacttacaggcttgtttgctaaatgtcacgtctctgacaaaaagcaggtactcaataaatgtttgttgccttaatcacattgtgtgtatatgcaggttttatatgtgcacatatgtgtctgtattcatatatgtgtgtgcctgtgctccctaatgtgtggtggatggatgcaggttcccaggaatatgagctcaagtatatctgttgaataaattaatcaatgaagtcaggtccaatcggaccacactggccactgttggaaacaccttctttcttttaatgggaaaagtgtcagttttattgtgggacagtttttgttgaatctgtgtcaagcacatacacattccgcttggtttgatctagttgaggatgaactagaaatacttttttttttggtttgtttacaaaccaatgatttcctataacaattataggcagtagccagcctgggaccatgtcaatgcagtggaatggctgtttgaggcaggcacgttgttgtcactggagatggagaggccccactcgctcatgtggattccctggggaagatggagctcactagagacaggataattatcctcagatattggaagtgctgccatgcaaaggaggatgatgatacactggcaggaaagccgaaggaatccgagccacagaggaagaattctctgttggttagaggtgttggaccacagaacgcacaactttggcaagctctgttcccaaaaggggcacagcaggtgccttcgtgaagctatcaggagcatgtgccagcatgtgcatgccttcaatccaaggactctgtggttttggggtcttggtagccaggcccaccctcatgtttgattatgcacatcatgcacccccttttagggggtgagaaagattattctctagatcagtggcctccaaatagggcacaggccaagaccattctttggggatgcaggacctgacttcattgattaatttgttcaacagatgacattgagctcatattcctaggaacctgcatccatgcaacacacgtaagttaacaatgcattgataactcatatgcaagtttttaaataagtaaatatacatctgttatgagagcgtagtaaatttttctttctcatggggaatttgttcagagagggtgggaggccactgatcaacactcaaatctacctttatctctctttaattagttatagttactcctgactgcctgtagcaatcccttatccccagggcttgcagctttcaggatcaggtgatacctaaggcattcctgctgccagtggtgtatgtgttgggctccttacttctgccttcagttctgcctgtggtggtcttgattgacctgccaggtggctctgagggcttcatggggagatactccagttacagttccttcttcagaggcctcactctgttcaggattactaacgctatcatttttggtatgaaaaccatggtatgaacatttgttggggcaacttcgttttgtgtaagagagcaaagtctctgaactatctccaagcttttgcaaagcaatccttgaagtataatcatctacttgttggaacaggccatctctttattggaataagtttattcacctgacattcactacatggatatctgtaatgtaccagtgtgatccctgcccttaaggggcttatggtctagttgggaagcttgtcaggcaaagaagtatatagcacatatcagagttgctctaatagcaggtagaatgtttgtaaagcagcttaaaagggagcatgttaccatacctgggtgtgggcgcgtgcctgtgcacttgaagtgagagttagggattggaggaaactttgcagagcaaattcttgggcaggacatggaagcattaattgggagactgggaggaaaggacatcagggcagctctatgagagagcagcttgctgtttccagctgtttgcggtagtcaatgtggttggaccaaagaattgaggccaatgggatagtaacgagaggatgagttagggagggaatgtcttaactgctttgtagggattttggacattattttttccacaaccgggaaccattggaagtttttcagttgaattgtgacacagtcagatttgaattttagaaagatgactctagggccagtttgtacaatggattgatgataggaaggcttaaggagggaagctagatagaagctattgtacggttttggtgagagaggagtctgtattaaggggtgggtagtgatggaagaagggctgattgcagagatatcaaggagaggaacttaataattaggtattaattttagttttggaatcagattgcctgtcacatactaaactgcaaatttgggcaaataatctcacttctctgtgtttccattttgccatctgtgaaatggggattataatagtgtgtaccatttaggactattatgaggtttaaatgagatagtgcacgtagagtgctcaggacaatgcttggcacatagtaaacccttagtgaatgttagccattattgtaattgaaaagagaaagacagagcttcaataatatgcccttctggttgtaggaatgtagaacaggaaagccattgtgaggagcaggtttggggtgaagatgagagaggagtaaaaatagattttgatttggccgttatcctgccttccgtgcagatcctataggacccttgtcgggagatgtacaggggcaggtgggggcaatggttggcattggcggggggaggatgggggctgccacaagtttcagggtggttgttgtggtgggaaagacttggatgtggatgaggctgcctagggaaggaatgtggtttagaggaaaaggagcctaaatgtagaaactttgggaactgtaatatttaggatcgtgggggaaaggaatccataagatagactatagcagatacccagacatgtagaaggaaactaggagtgaaagaaaattctttaaaattcttcactggtgaataaatgaaagagtgtaccttcttaaccttcttgaagttggggcttgcagttgaaaattacaataaaatgatgaagaattgcattgtttagtttcaaaaactattcatgttggtttttcttctaccttcaatgtagtgaggtctgttcatttaagaacattcctggccgggcgcggtggctcacacctgtaatcccagcactttgggaggctgaggtgggcaaatcacaaggtcaggagtttgagaccagcctggccaacatagtgaaacaccgtttctactaaaaacacaaaaaattagctgggcgtggtggcgggtgcctgtaatcccagctacttgggaggctgaggcaggagaatcacttgaacctgggaggtggaggttgcagtgagccaagatcgtgctactgcactccagcctgggcgacagtgcgagactccatctcaaaaaaaaaaaaaaagaaagaaaaaaagaaacaatcctacaagtagaaacttaagtctcatatgcggtgatgacgaacctgagggttttgaatgtttttgcacatgacagagtttctggctcttagaacatcaggtcccataagagcaagaactcaaagatctgaaagaaacaaacgcagagaaatgaagtgacttacccaagatcagcaaactggtattctaatttgaaccttgcacttttttgagaccacgtgagttaaacatgattaaacatgaaatgctttggctaagtttttctgagggtctggcgtagaactcttgggggtgccagtgctaaagctcccctcaaagccatatacctctagggatcgagggaagaaattctcctacctctggtctctgtgggctgaaagagtgagatgcccacacaagagatgctggaagccctggctcagctagcaatataagtgctggtaattaattcacttgtggtttctttatctctgcccagaggtgggatgcttggaaagacagcaaaataatttaaggaaattgaggctcagctctggttgcctgcttgctgcccttccttctgccttcaactctctaggactgggggtgggggctgtgtctgtgctctgaatgcttgctgtgcatcagttttccaggaatttcaggacacaggaattatcacccagctgtgttgtgtgttgctgttcagcaatctgaagttgcttatctagcgtaagtcagaacggggagcctagggaggaggggcaacgccttcatttttctaagcagaagagactgaggtgttaggggcccagctggtatgcgatgggaaccaagaaatggagcctatgtggacatgcatgctttacacaaattctctcgctgaaactcgggaatgttatcagaaagctatctctttccacctcatccaacaacaatgcacactatttgaggttcactgtgtgtcaggagaagcactggtggtaagactggtgagcaagacaggcacatcctgcagcttaattaaccaagcaattatagagtggtgtatgcattaaaggagacatatgtgtaacagtggtctctatgggtttattggtctctcttcacatatggcagagaaaagaccctgtgaagttcaggagtgtgattaaggtactccaagaagtcacacacaggaggtccagggcttttactggactcactgttcttggactggctctcctagcctgggtctgttggctgaggaccacaaatgaagccagcagacttaggacttacgcttctaagtttagtgcccagctctaatcatgctcctgagtaggccttgatgatgcattttaatttcatccaagttgaaatggtttggctctgtgtccccagccaaatctcattgtagctcccataattcccacatgttgtggaagggagccggtgggagataattgaatcatgggggcaggtctttcccatgctattgtcatgatagtgaataagtcccccaagatctgatggttttaaaaacgggagtttccctgcaaatgatctcttctcttgtctgctgccatgtgagatgtgcctttcaccttccaccatgattatgaggcctccccagccatgtggaactgtaagtccaataaacttctttcttttgtaaattgcccattctcgggtatgtctttatcagcagcttaagagtagactaatacacaagtcttatgatttattccttcttattttgattgggtaaatttaataataatgacagttaactaattctcatgaagcacttactatgtgctggggactggcctaagtatgttcatgtgtgacttctttcattctcccaatcgcttccacccaggaaggaggtggtggttgtcctggctttacagatgaggaaactgtagctgaagagagaaagcatctgtctaaggaaagagcccaggcagtggatgtggaatttgagctctttactcatctctctctctcaccccctattcaatctggcattgaatgggggcgggggggctcctgtggatatcagtgactgaaccttgtcctcggctggcccagctggggggtctctagcatgcaaagacactgccagtattcattgacctgtcttttgaccttctccctctcctgcacataactgattttgctctgctctgatcctgattcagacacatgttcttcaaagagaaacatacaagctgccctggactgctttttattctgttgtcttattccatctcattggccatcattgagatggatctagaacgatgcttgggctggaatcgcatattctctccatcttttaaaatctatgacctccaggtaatctttgttactgtttttgttagtctgttgtccaccactatccaaaaggctttttgtcaagatttagtgaaaatcttttacttgtattaaattgtaaagtgaatattatttcaattacattgtaaagtgaatattatttcaatttatatatttccccaactcatgcattttattgctttaccccttccccctcttaagcatcacaatccaacctccttttatgaaactgacttagggaggcaaggtgacttacaatgggccactcaggtagcaagtggcttgggactgggactagaactcaaatatcctaactcccagcctagcactcattctcctacatcactctgaaaaaagattttggctaaggagaattgattgattcaaaagaacatcaattgccaagcacaatcaggggtgatcaaaacagttatggcgcctgtctgcaatgaacttacaaatgagtggattttttttatggaaaacataaaccaataagtgtgtaattacttgtgatgagtgctgtagatggaaagaacagagtgaggggaaatctaatgaaaaccagggtagtcagggaggtgtttctgaggaggtgacatccaaagatgagaaggagcaggggagaaagccaggcagcggggctgtatgtgttcattgtcatttgcttggctgaagaacaagattggttagtttgatatcgttggccagaactatgtctttcacttttatgtatttgcttggagtatggttgatgggtagtgatggatggatggatagacggatgggtggaggactgactggggttggggaaagagagaagccatcagtgtgataggatgagggcagctcaccttggctggtaagtggacacacacatggccctctccttccagaatgcagaatcttggaggtaaggattcaggggtagaatgtctatgtaaaggaagctctgttgtgggagaagggtaaaaatgaagggctgctgggactagaaagcaataatgtaatttgccaccagccttgagaaacttattgctcgaatagctgcaccgtgtggctcccacccatagtgccatagatcagcctgaaaattcccaaatagcttctcctcctccttaatgtctcagtcctgccctcccaggtcctcccacctgccacagtttgttttctcggtacatgaagagaaaggggttgttgtcttgatagatctctgctcttcagctgttgttgccagggacatttatgttccagaacatctaaaaggttctcaacttagaggagtagtggaaaatctgaggctggggagtcagcctgattcttgatgggccattcttccttgattttaggctagcatctattgacctcttactacgtttcgggcactgtgaatagcttcaccttttattcccattttacagatgaggagacggaagcacagagacttcccgatctaccctccacccagtagtacaaagatacacaaggcgctagagtgaagtttttccatcctgcatgaaaacaataaaaataaacaatgtagtacatttttggtgaagtcactttttttttagtttatgggatatgcccttttattttggggatgtgaaaagaccttttctttttaagagaatatgatgatataaagtgtcagtttttagtttttgttctttcttggtagtagagaaatacagttagccaatgttagtttccaaaattgctttagatatattagaggtaaataaactctgttaatctgaagatgactgttgcagatgttagcttcgtttcctttaggagtaaagtatttgtatgattttatccactttttattctgatcatttatcagaaaaaattgcaaatagtagctctgagaccatataatttatttttattcagcattaatcaagatactttgattgtacagttttgaccctgaggccctttacctctatgttggcataatcggaattagacaaagactgcagcatttttatcaatggagtatttttcagaagcaaacagtacgggggtcatataattcctcgattcattttttcttcagcacagttaaaccattccttattttttcaattcagttttatcttactgaattatttttaacaagatcaattctgctccatatgtattctatagtgaagatttgattcatcaatcagttatttttcgtgtgcctatcaaattttaccgacacggcttctactattgtgaatgttcttttgtggccattatttctgccacatccaattttctcacatcagatttgcaggtctaaattttgtcaagaatgtttgatccttccttcaattttttagttaataacaaatttcaccatgcgcatttttagctgctgtcagttctattttgtgtgtgtgtgtgtgtgtgtgtgtgtgtgtgtgtgtgtgtgtgtgtgtgtgttttcctgacaggtctaatttttttccgggtcagtttttgcagtttgaaaaaccaaatcttcttcctacaactaacgtcagtccctttcctaatagtttctcaggaatgtgtccaaaacatattcatgaagtcaaaacgtcaggaccaaaatagcctgtgttgtttatagagaccagccactcagaaggattaagaaacttacccgaggtcatacataaagtgggcagcagatatctgttgggtcactatagaatctacagcccctcttgttcagtgaggggcagagtaaggatgtaaaattgggatgagcttgacgttgtgccttcctccttctagcttctgcttcccaacccctctgctgagctaacagaatttccactgacccagcctccccaagaaatggcagctggggccacagttccaagcctcttgacttctccatgcttcctagctaggtccgccttaagctgtatgtgcagtggggtggcatgatttacaaataagcaggaccaaaaaggaaaaatcctctcttgtggaaaattaggtcagtggcagagttggggaggggagggaatctgggccctgttcttctatcctttggttcattcccctttcctgaagccagcagggcagaaactgatggtgctgttgggagcagacatctgggggtgagggggtggggagcagtgcccgttcacgtgttcttgtgtggatatgtgtgagcatgaaagtggtctgttttgcagccacttgggactcccctctctctgaatgtatttgtctggattactctaagggggatattagtgttgtctaataacggccttagatttatcaggggatttgtttgattaattccaaagcaaagtacagcagatagattagagctcagccagtgtagtgggtctataccacccatctctgccctttctaattcctgttgcgggggcttccctctctcgtctttgttgtcttgatggttgaaggctctagtgtttaagaccccactgtgtgatagttaaaaccatttcccactgctaaaatgcatgagtgagtgtctgggcttagagataaatctccaagttcacactgttgtttctctacaaaagctgcagaaatttggctacttgcttttctttcccagttgccactgccgtactctttttctgaatactaaaaatgttttattgcatttataaacacaagcttttggtgataggttggcactgagtcttttctttattgggaagttgtaggtcaggggcaggagtagagaatcctgtatgtttgctttacaattttttttcaaggtgcacctgtttaaaagtgtgtagagaggaatgaactaggggaggttagaagtaggttagacttaataggtttttgttaagttacccaaaaccagtggtggtaggtggcatcctggtgcctgctagagttgtggagaggggagaggacactgatgaggtgacgagacagatgatatattaagagttagcaataaaacacatttgtatggcattttatatttttaaagcatttttatatacattatctcatttgagtatcagccccctaaaatatattcttctatttaatataaaagaaatactggcacaaagagttcaaggtcattcaatgaactagtgacttttagaactgaaaccacctctaaatccagtgcttgctctcaccatactcttaatgttggattcttctcccagactcccagtccagggtaccagtaccccagcagaggcacagtgggaaaagcaatgacctgggatgcagatgacctcaattctgatttcagctccaaaattgtccagctgagtgtacgtgttaattcctctctcttggatctgtgtttcctcttctgtgcctaaaagtgtcctggacaactctacagcactgatcacaatgataattaattagttgcttgtctgattatttgtggcccatcttcctggctagactctaagttccaagagtgcaagacctgtgtctgtcttgttcatctgccatcaccccagtgcctagcaccatccctgggacatagataatgtgaaaagaatatatgtcaatgaaatgaacctgtacaatgaaaggaatggaccttacttgaagtcctaagactcttccacttttcaaattctctgctttttctctgttatctctgaaacaatctgagaaacacctcctttttttgtttttactgtttttaaactgtctttagagtacaacagaaattataagataaaaatagtgattaataataattctaattataattcacaaacatattattaatatgtgaatgtgaaatcaaaatgctttttagggactctctctcctcttacttaatctgtgtttctttctttctttttttttgagatggagtctcactctgtcgccaggctggagtgcagtggtgtgatctcacctcactgcaacctctgactccctggttcaagcaattcttccacctcagcttcctgagtagctgagattacaggcacataccaccacgcccagctaatttttgtatttttagtagagacagggtttcaccttgttggccaggatggtcttgatctcctgacctcatgatccgcccaccttggcctcccaaagtactgggattacaagcatgagccaccaagcccagcctaatctctgtgtttcttggaagcagaacgtctccttatctgggtttctgagctccctctggaagggcctctgcagactcctgttgagccttcagaatgggactggtactcattagtaggcaatatgcatgggcctcagactcaaaaaaagattcttttaggtccagagctttacaacacctccttactttacaaagaagaagaaatcaaccttgcttatttttttttaatgggagaaatggaggggtacaaaggaaagctgaaaagctgccaaggggcttagaagtaagagagtcttctaatagggctactgactttcttctggggttccccaggtcactagaaactcattctgtcagggcaaggatccattgggaggcattcagttgaatgctgtcttgagccactatgttaccccttccttctcaagttcattgcaaaccgtgctaatcaaccataaagttctttctatcccaggcccatgtctagcttcaaactctttcttaacacagtattccaggttgtcaacaatcaaagaacagggaattagtatgtgctgagcatggtgtcaggcaggtcattaagcattttatatacaattgattcttttgataagcttgacaactctggaattgatacaatgactcccaatttatagatgaagtttaagggacttatctaaggtcacataatgaatagcaatattggcatttgagctcaaaactttctacatacctctcagtgagcccagccctcaggggtgtccatctgcccatgggcccatatggtgaaatgtctttacaaaaaattcctcagctaggtacagtgtctcacatctgtaatgccagcactttgggaagctgatgtgggaggattgcttgaggccaggaatttaagaacagcctgggcaacaaagtgagacccctctctgtaccaaaagataaaaaaaaatgttagccaggcatggtggccatgtgcctttagtcccagttacttaggttgagctgggaggtccacttgatcatgcagctgtactctagcttgagtgacaacaagacactgtctcttaaaaaaaataaaagatttctctccactcagttgttgctgtccatcctgtgggggcactttgagatttctccaatcaaagactttgaagcgttctctgtcaactctaaatcccccattagtgctaagtatgataatagaagaccatgtaggaccacactatcatgtttacatcgtctcttggttcataagattggtgactaacagcaatgcagagccgtctttttgagtctccagtgcctaagtcagtgtctggcatgtagcacctggtcaataaatgttagctattttgaatagaaccagacacaaaggctcatgatgagaacaaaaaaagggtgaggataaaggcttgtggtaaattgtaaacctccccagcttttctgagaatcccaaagccagcccttctcaaactgtgttctgtgagatgttactagatgtttaatgaggggattgagggggaattttcagtgatctaaaaacatatatcccctatggactatatctccttttggactccacagtgtatcttagtatggatgaaatcttctgaagacttgggatattaaaaaacaaacttggtgtgctctaaatttactggaccaccgttttgttttgttttgttttgttttgttttcaaagaacaactgttcacatcttgctggatgttgtgatgttgtatttttatggaatttagttttggatatgctaccccagcttttaatcctttctctgaaatatggctcctgagatcccacgcagcattggacgttgtacatacaacaatgcacattatactctaaaatacttaatgaccatcagttccttccatactttccagtggtctcagcgagcacacactgatttcttgaaatttgtcctggtgtcccagaggatgatagatttgggtggtgagaccagtaagggaagaaatatttgtggatggaagtatggtactgtgggaaggaaaacgagtttggagtcagagaaatcggagttcacatcctggctattatttatgagatgcctgaacttgggggatattaacttccctgagccttagtttccttgtctgttaagtggggtaacaacagtatctacatcagtaggattaaatgaggttatttacatacactatagttgcaggggcctggtatacaggaagcactcagtaaatggcagggattataatagataataatccctgccacgctgtcttctgggtcatgtttttcacatttcttttatgatgttattgtgaatagggatcccactaaaacctttttttgacactaagatctagcatattggctaacaaggaattgcccctcgttagtatttctggagtgaataaacgaatgatatagcactctgttgtttacaaagcacttacatatttgtggcctcattcaaacctcacagcaacctggtcatgtacttactgtcattattcccagtagttggggatatggaaaatgaagctcacagaggctcagttggcaaaagtcacacagctagtaggaagctggaaagtcaggcctcaaagccagggcttctgtaactaaaatgtggactgtatacacaatggaatattattcagccttaaaaaggaagaaaattctgacacatgctacaacatgaatgaaccatgaggacattatgctaagtggaataagccagtcataaaaagacaaacactgtgtgattccacttatatggggtacctagaatggtcaagttcatagacattgaaagtacattggtagttttcaggggccagtgggagggggtaaagggaattagttttaataggtaaagagtttcaattttgcaagatggaaagtgtggaagtggacaacggtggtggttgtacaacattacgaatgtacttaatactactgaactgtacacttaaagatggttatgatggtacatttcatgttatgtgtattttatcacaattcaagaaaactgggaaaacaaaactagcaccagggcttctgactccaaactgaggtttctttcccacaccccgtatcaccatcccctacagagcagctatagtatgcctcctcttctaagacactttattttgtattgaattgaaaagtttgcagaactcacctccactgaaaccctagaagacccacctgcttctcctagaacattcatcctgttggcctaaactctgggaagtcggagtctttccagagagtagggaattctttgaaagagggcagatcctctgtctcaaggaaatcactggggtcaagtaatgcaataattgtgattgccagcctcaatgactacttcttttgtgccagacaccttgctaagtgcttttgcgtatgttagttctttataatgcttacatcagtcctaccaggcaagtagactgtccccattttacagatggggaggttagggctcgaagagattggctaacatgcctgagctcatgtgtgcaagagccaggattgtcatccaagtctacctgactctagaacctgcctcttaacctctatcctatctatggtgggggcagagaaattggagatgtctgtgtctagagtgttttccaacataggaattgacagatttctctctcctcctgtgacacacttttctctctcctaccagatgatgggacatctcatttaggccagtttctgttttgatttcctggtgtcctctgagatgcagatgtgtattcctttccctggtgggtcgtgctgcagtgtgagaaggacagcttccatttctttccctaggaagttgatatatgcatcctgtttcctggcagtgcccatctgctatgaggactttcccaaggccctcaccctgccgtgtgggagactactgcaggtgccaacctcatggcctaaagctgggaaatattatttggctggaaatgccttttgtttgcaaggcttaaacaggtcaatagaagctcaacttgtcattttcagtttacaagagatgtgtcaacaagccagcagaaacagtaataatttcaataagtttcctgaatgtttactatgtgcctggcattgtgctgaacaactttatatggattatttcacttaatcctcacaatagtcatataaattagggacaatcagttctgttacaacacttgttttgaaaatgcaaatttgttctaatgcaattgatgtattagggaacattttgagcataataatttcgcttttgattatgcaggattttgtccataagaaacactaggtgaaggcagaaaactgcagccagcagaagcaagctgtgtaggaacactcaaagtgcacacatctcaaacttgtaccagcaacttcagctaccgtgtgtgttatgagtcccaccccacaaatgatgtttcaactttgtgtccaattccaggagatcctcctcctacactttacaatgattcataagcttcccattttcacagacaaacttcaggtctgttaaaagtgccatatttattgtagtacttacgtacttcttagtgatttaacatgtatagaactgcttcctctattacgtgtcactgatgaagtttataggtgttgcatcccaacttcatctttccggttaagctctgtgatttttactgtatgattttgcacagcaaaatgacttttaggattgcatacatgcttctggcagaactggctttactaccattattcctgtgtggcagaagaggaccatgaacctaagaaatttgccaaaaatattttaaatgacaagtggcaaagctgggattcaaacccaggctaccttactcccatgcctgttctcaaaacttctaaagcatttaaaaaaaaaaaaaaacaaaagggctgtctgcactgatctctgattatatctgtaacaaccagattgcctcttctcgcaactgtcaaaccctgtttcctcaagccagagccactgcaagtatgtgagagcccctgaaggtgtttgagtacagcagtgacctggcccacagaaatgcctgccttggtccttcctcttcccctcctggccgctgcctgcccaggctgactggtgcctgatatagctgctactgatgctccatcttgcaatctggagttattagcatcaaagaacaaaagcaaacagcaccagggctctggggctcagtcctctatgaaggtagatgaatggacccttatgtcggggataaagctaacaccacccggccttttatggagacaactcttcctgtgtttgaagagctcagacactgagagccagaaagagccctagaacgaaggaaacaacctcctcactgctggaagtttgctttagttcttaactgaaaaaattgtttctgtgtttgttcttgaagaagaagggaaaaccttatgctcatctttcctgggggcaggagtcaataggccactggggaggtgcagtctttgcctttttttttgttttttcttctaatgttatggctcagtgtaatctttagtggaaggcctgccctgctatttgagggcctgaggcaagactatacatggaggccagtggccagcctcccttctctctttgctagcaccaggaaggccctcatgcacgtttatgtgacgccccagcctgtagaagcccacaactcctgcagacagcttcttcttggccactttttgacactagagtgcacataccagtaggttggtctgctttgagagaatggaccctgggaagaggcccatctagatttggagcaattgggcgaggaattctgggtaccagagcatattctataagggtggggcaagtattgctggctctaggtggaaacatctatttgatctgtggactcttcagttcctgggctgggatgtggctgcagaaggaacagaatgggcccctctaaaacatatagcccagggcaggggctccagttgctcaggcctacggcattactgcattttacccctttcctctgtcccttgaaatacctttttcttacttctgtgagatgcccaatattctcatacctaatttgtagctccatgggttagatggtttctgtcctggtttgctcttacattcaaaaatatagtttgacccttacctgatgtgctgctgagtctgagaggtataatcatagtgcaacctctctaggtcttagtttccttatctgtaaaataggatgaataccgtttctacctgttagggttttaatgaagattaaataagatgatgcatatgacctaggggaggatgccaactcccttaaatcaatcttatctggctgtaaactgtcttttcttcggcaatttacccccactttttgtctattaaaaaaatcaatatacacatatgtatacacgcatatttgcatagatatttcctcaggccagtcctggggcccagtgctgcttccccatacacagaccccatcctgtataacagcacacagagaatgcttaataaatatgagctttattaggattaatattgcttttatcccattttgtcctcacgttcaccctctgatgggctgatactgccagaatggtaattgacagaaaggggaatccacagctggatgtccaggattcaggttctggctccacaggctgtgtgacttttggccagttacctaagctttctgtgcctcagtttccttatctgtaaaatgagtgtggtaatagttcctacctcatcgggttgttgtgaggcacttagaacagtgcctagcacatagacagccctcagtcaatgtcagctggtgattttattaccttcatatatgagaggataagagtattataaaaatcaaccccaaacctttcctcttgtcacacagaaggaaggcagacagacacagaagggacgcagctgcaggtgtttctgactccttgccttgctgcctccccatttctgagggtctcatctatacagctccctctgcctgtggatgctcctgttagaccagctggggtctgtgtatggaggagcagcctagagccccaggactggccagaggaaatacataggtaaatatgtgtgtatacatatgtgtgtatcaacttttaatagacaaaaagtgggggcagattgcagaagaaaaggcagttgacaaaccaggtaagattgatctaggggtggtggcattttcccctgtgccagcacacttcttcagctacctcctgctgttttattttctcatactgatgggcctgtagttttccagagcgccactgcatttaaatctgtattctattttctctcctagaaaataggtcagactcaaggcagagttcaccaggtggggtcccagaaggtttgactgggactcgcctacaggaggctggctgtgcagcctgtcccatgctccccagagctcttccagaggcatgggggagttgaagtagcaagtcaggagaatcttggactcatacctgtccgtccaaatgatctagtacaaatgaagagtgaggtgggaggactaccccggctgagctagcttctgcaagtgcaatagtggtgaatgatgggccctttcttttcctcccaatggttatgtattagtctgttctcatgcttctgtgaaggaatgcctgagactgggtaatttataaagaaaagaggtttgattgactctcagttctgcagggctggggaggccttaggaaacttacaatcatggcagaaggggaagcaaacatgtccttcacatggtggcaggaaggagaagtgctgagcaaaagggggaaaagccccttataaaaccatcagatcttgtgagaacttattcactaccacaagaacagcatgagtgtaactgcccccatgattaaattatctcccactgggtccctcccatgacttgtggggattacgggaactacaattcaagatgagatttggatggggacacagcaaaaccgtatcaggttagaagaaccaggttccccaaactgcagaaaattgtttcccttggacttgaggatgaccatgctgagcatatgcacttgtggctgaagttattgttgaatatgcagtaagtgtccatgggattcagagtggaggcaggaataccctaatttccttcttgcctggttgtgatgctgaagagagtgggtgaaagacggaagtgggtttccaattctttctttcctgttttgttcctactgtttagagcatggagatcctaagggaggtggctgcaactgggacagagctagttttcatcaggattactttttccccctgaatatttcttgagtacctgttacctactgaggacgtgtgtgaatggtagagctaggaaggtgggagtaatgtgagccagtcctcagtttttctatcataacttagaaataactaactgaacaggtacagcctagatcttttgcatttgctattcccctgcctaagtagtctttgtcaggtatacagaagagtgtttctcaccttcttcaggtatcagctcaaatactacttcctcagaaagacctctttaactaccttctctaaaatggggatactctgctggcacttactctacttttcctttcttcatggctccaatcactatttgacattatgtatctgtttttattcccattaaaacccaagagtattgtctgtttcattcactgcttgtatctccaatgtttaaagcagagttcagcctatgatagatgctcggccaataggtattgaatggtgaatagatgatcttcattgataaaactcgcagaaatacttttagtatctccatttatacatgataagtttgaggctcagagaagctaaggcagttgcctctagatgagggggtagagctaggatttggttctagatcatcttaatccccttattaagaaaagctgttttcttctatgctccccatatttttaggtaagctgtcttcacatggtaacaaaaatggaatatggcagctctagagaaatgaaagcaccccatttcctgataattccagtaaaattctctgggaagactctcattggttgggcttgggtcataggtctgttcctgagccaattattggaaatagaatattctcaagacctggactgagtcacatgactactacccttggagctcaagtgggagtgggggtcacctctagcaaaccacgtgggctaaggctgggaagggggctttccctggaaaacagctgaggactgctacaagaagaagaggaaagggatgctggatagacagtctggcagatagacactgctaaggttttgatccttacctgctagccatccccctccttcgtctacctcttacctttgccatttcgttctgtcaatcagaattgagtccagagattcaggtcactcactgcttcttgggccaggggccaggtgataatgtgtctctattcctaaagttggaataatgctcagacctgcctccaggtcagtgccacagttaggaactgagcttggaccttgatccccagccagaagattttgttcatttgtttgtttttggtgggattgttgcccctctttgacaagaataggtgcagtatttttacatacaggactagaactatgccaaattgagacttgaggagggaaaacaaaagaaataaggatggaatttgttttgatccttgcttctgttcgccccctcacttcacactgaggaatggggtgggaaagaaccagagggaggggagatcgggagcagatgtccttattcataagtagaaaagtggaaccaaaatcactggcttcattcctgtgatctcttggtgtttccagtgagccatctggtcaatattttttgatatttccgtctgtggtaattcaaagtgatgacaatcagagtcactaacgttatgtagcattgtacttagttcagtgctttacaagcatttaatctcatttaattctcataacacccccatgagggaggctctgatatcattctcattttatagccaaggaagatgactcttagaagttaaatgatgggtccaaggccacagagaggctgggatttgaacccagacctgtccgcctctgaaatttaagattgtaatcacatccccaaatgggcaagtaaccagtatcgaaaaacctttggagttccaaggaattctgtctccctgtgacttggtgtccccaaggagcctatttgtatgaacaatggtgttgacattcttctgccacagaactcggccacatgtaaatagtttgatatcctgtttaattaaggggtattttaacatctattccaggcaatccatcagtaacagttaatggacccgcctagttatttatacaacactttttccctttccacctcttctcttcttcctgccattcatccctaaatctaacacactagaaaacctgaaggggcggtgtggctgaggcatgattcagagctttctagaagtttctttgggcagatacagcttctaggggaggcaaggtgggggctagagaagtgctcagctgttgctatgggtatgttcattctggggcacagcttagttggtcagcacctggatttcctggggcaagggccctaaggacacactggagctttacaaatctgattgcaggtgtttcattatcggttggcatgaagaacattacccatcctgttcaggcagcaaattagaggcacagagaataaaccatgacccactcatagggcaggtgggagacgctcacccagcttccccatggcttcagcatgatcactttaatctgcaaaccaaattcaggtcctgtatgctcttgagggacctaggcttcagttgaatgaatgatggactaggtggtatgcaagagatctaggatattttctagtctgtgcccctgaagtagctgtgtgaccttatataagtctctctactttttcatcctccatcttaacaaaaaagaactaaactaggtacttagtgtctgtggctactccagatccaccattcagtgattctaagtgagctatccaagactgccaggttggtcattgtttcctgaagcagccccttgttccttctcctctgctgtggtatatcctctcaggttgggtctaggggttttaacagtgccttgggctgctctgggttatgcttccccagcccgattctatttcacatctgagggaaggaggaggagattatgttgttcatggggctgataggcgcgaaccgttcttcattttctgaaagttcattggcttaattcaaatgtcaacctgtctagggttgggtgtttattcgtagttgtcaaaagtgatttcaagtggcaatttctgtcattagtgttagggtgaaaagcaaggaaaaaaattaaagtaggaggcaggatttcaatttgtttgatgaatgatctactcacacacaatctcatgcacacacactgctgtctgtgatgaagcgtggtcactgggtgtactggggaggcggggaattgtaaatattttgtgaccttatgtccttcagtcctatgtggtgaataaatctgtaacttgctcttaattcttatgcctcttttgctttgtttctcaagggagtggttcatttttactttttctctctgctgggaaaccttgcttgacttcatgtccagtgtttggtatccaaagacggggaggaggaggatttgctttggtgtcagtgtgcagaaatcaaccagaatattttaaccaatattcttgcaggattccagtctgcttggctctttgaagccctatctgattccaggatgatgtctttccggacagatgtgaagcttacctctcttgctacatgcaaagtgaaaagggagcttggcccctcggcttgcatgggtggtttttgggtgaaggtggaactaagtgctcagaagctgagtacctctggggcttgcatgaacttgatagtcatgcaagagcacattgcattgtgtgtgtgtgtgctgctaacactcttcttcctttttctccccttttctctcctctctccctttccctccctttgaaaatgctgccacagatgtcagtcaagatccaggtgagtctttgtgtttgcacagctgctgtgggaatttcccctctgctagattgtgcatggtttgagtctgagtgagacttttatagagacaaaattctaagtgtattgcattttcactgatctaggtttagaagaagaaatgcattgaattaatggatttgtattggttttgaagaaccattttaaagccaaaggaatatggttctcatacttaatataatcacttccttctcattagtatttctgggtgattcagaaaatgaacatttttgggaaagtatttgtaaagttgttcttagatatgtattctccaatttaatgaacaacgttagctttgtctttcacacatctgcttatcttctctagcttcatgtggttgaaagcagaagatatgacatacgtagcatggaaaatgtgatgtgggtgaaaggaggtttctttctttttattctcagaaatgtctttttcacaatgaaaccagcaatatttattgtttttcctggttatgtaaataatacatgctcactgtggaaaaaaaaagcaggatggtttgaataaatggtttttgtcaatggaaaaattaaagaaccacgtttataataattatgcatttctctttttaaagtgtgtcttcatccagagtcctggttttaagcattgcgtgtgtatagacaaatatatatgcacacacacatacatagaatcatgtgaactgatgcaggcatttatggataagtgtcagatgacttagaatggtttggagactattctgaactggctagaactttgagttaaaaagaataattaacttgaccaaataggaagggagcatcatttcaggtgttttcacatgttttcttgtttagtccttttaatatttaatttttatagcattaatacgagataagtatcattatattcattttaatgtacaggaaatttagggcctgttaggttaagcagttttgcccacgatcatagagcttgtcagtggtagcactgggatttgaacttctgactctccattggaacatgctgggacctgtaagtgaaaattctcagtgattaaagattttgtaagtatttcctaatgagactattgattatttgtttgtttttgcttagagatacttgacattttctttattagcagccttctttccaaatgaatttatctttttattgttcttaaatgtctaaaataatcaaccagacttaagtagggttcttctgatcattgttctgtgtgggatcttacacaacataaaagtagaatacagttattctacttaatgcagagagtttctctccatttcttcctgcctgctccctacctttgaaaataattggtgtttgaaccaaagcccaggacagcatttcctaggaagatgccattaagtttattatttctatttaataatattttagttcaatcgctcagtcaacaaatatttatgttccaggaactgttctaggccatggggacaaaacagtgaacaaaacagaagacattcagtgccctcatggaccttttattttagacagaggcagacaatgatctaaaatgtacacgcagacacacacatatctatgtatatatacatatgctttatatgcatacatatatacacacgtatatgcatgttttgtatatgcatgttatgtatatattacatatgtatagtatcagggggtggatgggaagtgctgtggagaaaattgaagcaggatagaggagaagtccctaatttacaataggtagtcagggaagtaccctctgataagatgatatttgctgggaaacctcaaggaagcgagggagtaagtccaacacctcgttttgtttgtaaagtgccacgtggcggcttctctttctggttcccagcagagaagtgaccaggggtcaccacatagagctgggccctgcatagggtctcccagccaagggggtgaatgggggtatgaatccaacctgtgttcctcttgccaagcttgtgcccatgaggctgcctctgacaaaaggggcatctttttctagtgctcacacaggcgccatattggtcctgggtgagataacatggtggagtgaaatgcagtggacccataggccttctgccatcctttcaaaggggtagaagtctgaggaatacccttcctcagataacagcaactatgaccagcctggcccacaccatttcaatttcatggctgttgtctcattttgttctgttatccctctgaggtgtgtagcccgagtgtcatttcagtgttgaggaagttggggcccagggaagttaaatgatgtgtgacggtcacccagctgttgagtggcagggccaagaggggattgcagcctaatttcagatcttgtgctcttcattctttcctcgaagtgtcaagggctgattaccaatcttgttgccccaccaaccccttgcttttttgtggtttctgagcctgaagcaaatcactggtttggacccttcacttggggccctggacatggcaggaggtggcctgagcgtgcccggccctggctgaggtcagtgggggcctcctgcctctctgagccccttgccaggcattctggagccgacagcgctgtggttctgaaacaagaagccttcagcagttctctgactcttttttccttcccctcaggaagtcaagttggggattttatgagctaatgtaactatttacccagaggccgctggaagactataaagggatgattgattaattgattaattttacatgtggaggagatgagttagaagtaaccctactgtaaagcagtctgagatggggcctggtgggcaacacctttcccaaggtcccagagacaggttagggacttggagcaagagcccagggcacccaggaaaaaggggcaggcacattttcttccacttcatggggtgaaatccacattccctgcttgtaacctttggggaggaggttcagaataataacagtaacaataagcacttggcaggtgctgaagagggcccgggagcccagctctgacattctcttaaccctccatgtcagctcctccaggttgatgttaccatcctcagcacagatggagaaaagctgctgcagggagcttcagtaacttgcccaggtcacctcctgctggtgactaggccaggatcccggatctgtctgcctccaaagcttgtgctcttgttcttccagaccctgcctttcacatgacagagctgtgggccaggctgtgtcctatttgtgtctgcattcccagctctttgcacagcacatggcacagagcttaacctcaaaaatctctattgaacaagaagtatggccacaagcacatggggagttttgagtttgcagggttccaagacatggtggagcttaaagggtatcctgtccaaggagtgcaaactgaggcccaagaagggaaaggacctatccaaggccatgttacccatttgtggcctggcagggacccctgtcaggtgccttatcccatgcttttgtacattgggatttgtcactggtcttcctgggctgcttgtagggcagaggtgggcatctctgccctgcctttaaccttcccctgctttttgcctgttctagaactctctggaagccatttggaggtgaggaagagggaagagtagtgggttagagcacagggaacaattctgggacctctgggtgtgagacccttcttctcccctcccccagtgcttctccctcctgcctggaggggctgtttatggtgctccaatgacagcctctctcctccgaagggataatttctcaggctctgcctgctgattagacctggaatttaaatgaataactgtgaccttgtggaagtgccctagttattcagaggcccgatgaggaaataggcctcctgcttccatccatcagagccctggcaggcactgtgggaggggctcctgtctgctgggcccccaggaggcctccgtctgctgttgccaaaggaacagatacctttgctggagccttcccctacccgctcttgatctccgccccgtattgtgttcctcctccattgtaagtcatctcaggctgtccttggggaggggacctgattatgtgtcctgggccttgccctgtctccagggagccactcagtccagcctgaacccaaagcttggagacagctctagtctgacttttgtttgtggacacagaggggatgcacttgaagcttgttgctcacagggcgacctgcagaaccgaccagcagattctcaggcctgctgaatcagaatctgcattttatcaggacctctaggtgtatactcattaaagtttgagccacactgagctcaaattcccactctctcctcccatttgggaccaacagggctgtctttactgagaagttgcggttcaccttgcgaaagccctcgtcttcctctcttgtgctgggcacagaatgagatatctgatctggttgtggggaggaagaagaagaacgagattagggaagggaacgagaatgaacacttactgaccacttagtctgcgctggtcactgttcaggcacactctgtctgacatgttacatctttcatgtagatgtaaggcaagatagcataggatggagcaggagttggcaaactatagcttgagggtcaaatccagcttgcagcctggttttgtatggcttgaaagctaagaatgggttttacatttttaaatggctgggaacagtcagaagatgaacaatttgtaagacaaaaattttatgaaatttgaatttccatgctcgtaaagttcttttggaacatagccacacctattcctttattcctttatgcattgtctctggctaacattttttttttttttgagatggagtttcgctcttgtcacccagactggcatgtaatggtgcaatctcagctcactgcaacctctgcctcccgggttcaagcaattcttctgcctcagcctctcgagtagcgaggattacaggtgtgtgccaccacgcccagcaaatttttgtatttttagcagagacggggttccaccatgttggccaggcttgtctcaaactcctgaccacctgtgatccacctgcctcagcctccccaagtgctgggattacaggtgtgagccacctcacctggcctgtcttcggctacttttgagctgcacaggcagagttgcatagttgtgatagagcctcacagcctctaaagtgtttacaatctggctccttattaaacaaaagtttgccacctctgtctctatcatggcactgtgacctattcaagttactttacctttgtgggggttccacttctttcatctgcaaaatggggacaataagagaacctacctcatggagttgtttcgagcttgtgttagaacagtgcctggcacatagttagccatatataaaatagctattagtataaatgtgaaaggaaaataaatcttggggcccccaaatcactaaagggaaaagtcaagctgggaactgcttaggggaaacctgcctcctattcaaagccacccctctgctcgctgagatagatgcatatctgattgcctccattggaaaggctaatcagaaactcaaaagaatgcaacccttcatctctcacctttctgtgacgtggaagccccctcctctcttcttgcctttgcttcaagttgtcccgcctttccagacctaaccaatgtacttcttacatacattgattgatatctcatgtctccctaatatatataaaactaagttgtgcctggacctccttgggtacgtgtcctgctgacttcctgaggctgtgtcagagtgggtcctcaactttggcaaaataaactttctaaattaactgagacctcagattttcggggttcacataagttatccatttgatcctttaagcacatgtttccattttatagatgaaaatactttggctcagaaaggtttttttaaaaacggaaaatcaacccaccgttgtagctgtgtcttggtctccctaattgtcttgaggcatgctcctgtgcagtgccgtagaacctccccaaacacacctgctgttctctcctgtctcatattctctcccatctgtcctgccctttgtgcttgcagtcaagaggtccctcaaacttagatcccagccattgttctcaagtggggcttaggaaccagtaaaaaggggcaaaggagaccaatattttgtagagaacccacagtgtgccaggcacctaccacttcaccaatgaagaaccttgagctccaagacattgcatcctttgcccaaggtcagaagcagggatggtaagtttcagaatgtaaatgcaggtctggaattctgcttggtagttctgccacttttcccaggaggtgtacgcccttgggcaagtcatgtaacctctctgggcaataggcttcttttctttaacctgatagattagaatcagatgacctttcaggcttctttgattctgaggctgtatgcttagaccatctgactgagataccttggggaatagcaaccaggagaatgccttctccattaccaaagacttcaacctcctaactctagtagtacctatgagatattttgttttttctttgctattctttggggcaatactcttacttgcttttcttccttattactttatgagaaaaaaacacttgaaattgttgagcttgtattttaagccaggcatggaaatattaagtattacatgcctcatttaatgtttttgacatccctaggaggtaaattgctatttggcccatttcacccatgaaccaattgaggctcaggtacaataagtacctcactgatacaacccagtaaaaagtagtggaacagaatgcaaaccctggtaggtgcggcccaggagacatctcctagggagttccactagagtgtacacttcacaaaggtacactggtgtttacaactgtgccctcttagcctagaactctgacaatacattgcaggcacagaaaaacacttcctgaatgaatcaacagtgcttaggactcagctctttgttttatcccacatcctgctgaaagaaagtccgctttttattggggttcaccctgagacagaaggtaattgaatgaatctttattcagtgcccatcttgggcttggctcagtgggagatggaggctgcagggaaatctacctccattgcgtgtaattagattggaagggggccctcagctgggctaacagtgctcaattcccagccaattgcctggctggggcccaggaagacccccctggctcctgtagctgttctcgatgagtaagtgtgagtaaggagctgcttctcaacctgcctccagctttggctcactcagggatgcagatcactgggccttggtgcttttttctagagccgttagaaatccctcctttattgtcttaggcagacccaccggggtattggttatggtcacatttcatttcccagttctggagggcaaggccagagttttagctggaaaaatcatttgtggtatcctgcccctgaccctgccaaatgggcggaggtgtttatttgttgctccagtgttgagggcagcagtggcatttagaaggaagggataatgaatgttaaatgtgctgtgatatgcagaagagcctcattcaaagttttgtgctgctcaaaatgtcattgatgagaccattgcgagactattctagaccagttccctccctgtccaggagggggaaatgaggcaacagacctcctacacgactcagctaagccacacagctagtttgggacagccttggagaccctcccagtctgcagacctgcctagggaggtctggtaaggacgaggctaagcttgtcagtttgctaggctaggcctcaggaggggtgaggaggtggaatgcagctgagagtccagggcagtgggtccctttatggggtagcttagctgactgtgacgatgtagggaggcatctgaggatgcactgggcaggtggtccgctaatgctgccagcttattagagaaatggtgttggcaagagatggagggcagggcagagagaggacctagatagaccagtcccctaaataatggcagcaataactacatgcttttgagcccttcctgtgtgctaggaactgtgctaagtgtattccatgtgtggttacatgtgactgtcacagtgattctgaaaggatattttgcagatgagaggcaggaaattttacaggtatttttcagatgagaggcagaaggaagtgcaaagttaacttgctcagaagtcccaccattagtgagaggtggagctggaatttgaatccaggctttggattattgagagcagtggtctgcaaactctggtatgcatcagaatcacttggagagctaatgaatgagatccaggctcactaaactaggatagttctcccaggtgattctaatacaaccaaagtttgagaatcactgttttaaaataaagtcatcttgaagatgaagggacctgaaagcttcactcttcaccataattttatactcccacatatatcatgagtagtgtgggagattgtgaagaggaagtagaagggaagatgggatgatgatcttcctttgagttccccatggcttttaggccataggtctagtaaagccatcatgatgatacaccatagtcagctgtgtattttctggcccccttatctgctaccgtgggcacttgaagggcagcagtgtcttactctttgagaacagagatttatccatgcatgtatccccactacctgccacattgtaggtgctcataaacctgtggttagaatcagcatttcaaggaaggaagaggcccaatagattgtcaaggctctctgtgcacctaatttttgaatctcttctgtaagagttgattcagacttggcttggaccctttcagagatgagcaactcattgctcctttagcttttccattccattccaacagcactgaacatttgaaagctctttcttatctctagttgctatagcctccaccacctgtatggcttccagcccttggagacacacagaatagctctaattacactcctagtgtttgaagacagggcttttgcctttaaggatcttcttttctaaaggctaaaacatctccagttttttttttaagcattctcctacaaggggttttaattctttcttccaggtcattgttctctgaaaaatgacacattttattttttgcatcctttccaaagaaggatgcccacaccacatacagtattatgagtatgattgggatcagttcagttcattatagagtggtctcaggactccccctttttttttttgagatggagtcttgctctgttgcccaggctggagtgcagtggcgcaatctcagctcactgcaacctctgcctcccaagttcaagcgattctcctgcctcagcctcctgagtagctgggattacaggcacccactaccacacctggctaactttcgtatttttagtagagacagtgttttgccatgttggccaagctggtcttaaactcctgccctcaggtgatccacccgcctcggcttccaaaagtgctgggattacaggtgtgagccactgcacctggcctggactccctttttctagattagatatctattaatgacagcaccaaacaccttagccttaataaaaaaagattatagtattaattgaacttaatgtcagtgaaagtctttactattgtaatgtcagtggaagtctttactatttttgtgcccatttctctccctttcctggacttgtgcagttggtttatttaactaaagcttgggatcattctttgactttgttaaatccagctttggattttaaaaatccatcacaccatgatctatgtgggtgcagtgcttttatctagcacatcagctgtcccttctagcttcatgtcattcatcaatgaagaactattttagggaagttcatgacagctggagagcaaagactttctttcctttggaatgattcttttctaaaagtcattactgctgctcctttggcccctagagtgatggcataactacctttgtctctctgtcttccacagcattaatgcatgaggaagcctcaccactccttccccactaagagatggaatagcttgggaatatgctggagacattctttcccctacactgtagttaggccatacagaagctgttggttactcatgggcatgataggaagaaaccctttctgttcagtccagccaccttgccataagaacaatattggtctagtggcaaacagtgagtgggctggtatgattacatggtacaaaaggctaggtggtgaggactgaacatggtagtatcatggaagggcaaaacccagaggctggaatctgggcaacccctatcttggagaattagcagcaggatctctctcttctgagtctctggaaatcatcatcatcatcagtccagcaattcgatccattctcagtgctgtgtaaagcttgcataaaagccaaaatcctgtatgtaaatcctatatgattatcctgagtgttagctcataattgctgttaggtgattatttgaagctttgtatagcttggctgtagtggtgacaggctattgttgaagtctgccattctgattatgggtagcattctcaggggatttcagccatttaaaccaccatttttataggtcaaaacaagtcacctatcagcagtttaatacagtcctgcccaatatgttgcttggtgtctttggagatcatcagaattcatagaggcaaagaatcttagagttgggaggactttctggtaattatctcctacaacctcattctgactcttttttatggcatttctggcaaataaaatttcccttattattttactctctgttcatgccaaatgtgcttgtttttttttttccatcatgcatgtacaactttaaaaacgctcgatgggggccaggcgtggtggctcacacctgtaatcccagcactttgggaggccgaggtgggcagatcacgaggtcaagagatcaagaccgtcctggccaacatggttaaaccccgtctctactaaaaatacagaaattagctgggcgtggtggcagacacctataatcccagccactgggaaggctggggcaggagaatcgcttgaacctgggaggcagaggttgcagtgagctgagattgtgccactgcactccagcctggcaacagagtgagactccatctcaaaaagaaacaaaacaaaacaaaactgctcaatggtagctctcatgttcttacatgagttttttacaaagttagctgcacatagtagttccttgagctgttctgcatgttgacatgttttgggtccctcatggtcctaggtattctcctttggaattaatactccacttgactaatgcctcccctaatgtatggcaacatacactgaaccaaaaccctatatctggtatagacaatgctgagaaaaggtgagacttttgaacatttttattctggtaggtagaggattgcacttaagtgccaaaatttacatttagcccttaaaattaaatttcacttttgcctgttctcatccttttggaccctaattcttatatctaacaaattagttattttcaggttgaggtcatcacaacatcaagacagcatgccatgaatgtcttcagacacatcattgatccaaatgtggagcaggcctaggctctgctgtaaggaactagtgaaccctgggcagaaaaagtagattcaggttcacagtgaaggtcagggaattactcagggaagggctggtctgagacaaaattatggatttcacctgtaatcgcaactactcaggaggctgaggtgggaggttcacttgagcccaggagtttagggctgcagtgagccacgatccacgattgtgccactgcactctagcctgggcaacagagtgagaccttgtctcaaaaaaaaagggggacttaggtagaaggttttttctaacccttcccctttcctgtaaacattcttctcaatcccacgctgtctcctgtgccctgcctcctgcccatggtggcagacttcttcagtctgcatgtctcttgagtttctccattcaaaagctcctgtgcatgcccctgtcttggatgagagacctttaacctggctggcctgatgatctcatacatgacagtatccgtgactgaggagtctgagtgggtctcatgtttaaatttgcgttttaaagagagaagtggctttatgccactagataacttgggaaaggaagaatttcatgttttagtagattctgtggatgaggattgaggaaagggagaagacagccatttaaaagggcttcccagggccctttaaaccatgctgagccagggtcataaatgaagctgatgtctaggcatgattttctgcttctggattctctgagatatgtctcctttcttctccattagcactgaactagagggggtaactggtgtcatggttaccatcacaggctggaaagtccatctgctggtgcagagtcctcacttcacccctcactaaggtagtgtgactttagctctcagcttcggttttctcacgtgtaaaattaatggtatagcaatgtctttcccatagagctgtatttaatgagataacacatagccatgtctcgtctgtgataaacaaccagcagatattagctgttattgtaattctctttaccaagttaactgaattccgtctctttagtgcttaaaatgctaagatgtgtatttcaactggaagatgaaattcttcctttcccaggtcatttttgggagggttatcaagccactttcctctttaaaatgcaaattgaacaacatgactttttttcccttttctctcttttccaaattcctggtcaccctacagacacttttggcttctgcaaatttgggggcccaccctcttcccccttcagtatctactgagttcttccagaaacatcaggtgaatgtttctatgaccttctgattttgcgtaattactcttttaaaaagtccttgtggcttcataagaattcatcgttggcacttggcacttgcagcaattagtgacatttaatttctctacttcgctatgaaaaaaagagatgatatatgtggatttttcactgagataaaagttactctgaaagcgagtgaaataaaagtcttggcagagataacttttttttcgtcttttctgaatctttttctttttttctccccttgtgagtgacttccttccttccccgaaatgcttttgccaattacccagccagggtgaaggaaagaagaatggatttgaaaaccatctgaggtgggtgggatattatagatttaagggggagacaatattagcttaaatgatggaggccttcaacttctggcctggttcctgaacattacatcttcctcttgcctgtttcagtaaatggtttctattctctgtattagtcattctcatgacaggcttcatgatggccacagccgcttacaaatgactttgctttcatagccatttccattttcccgagctgcaaaagcagctatagctatctccatggggattttcccaaagggtgtaacatagtttagagggccttacgtgtactttgcatataatttacatatgatttgcagtctattctaaggcaatttcaactttgtatgccttatctcctggtgatctttttctcctcttattcctctatgtaccctgagaacctgtgcgccacagataggcaggtacaagaagggtggaatatattaacaggactagaaagagggaggtggaagggtcaaaagtatcagacatcctgttgggatccagctggagtagcactttttcagggtgtgacatcaaacgggagacacttccgttgctttcttatatttttgtaattattttttaaaaaaggaattgtagttccataagaatttgacattggcaattcttaatttccttagctgaactttaatggtgctgcattttgagtcatagctgaagatctgttcaaagccagagccgatggtgagactgttttggaaaggtgtggtcccctctgcttccatgagcccccgttttagcctgtgccttttcttttggcagccctggaatatcaaacccagaataaatgccaaactccaaaaccagccagggtgcttgtcctagggctggcagtgtgacctgggagattgctgctgatgggcatgcattttgaccccgtttctgaggtcgactagaaggtccatcttcatttttaccccttcctcatctacaacatacagaatgcatgcctagcatagactctgtttcctttgttgctaattatatcctactcagttaagattttttgagcattattttctataatttatgttggaaagccatatagttccttttcctttttttttgaatgtaaaattatttcaacatttatatcttaatgttgaatatgcttggaaaaaagaacctccaggatatcttaatatttccccactcctcccaggttaagactcagggctccaaccccttttcctttgaggtgtcattcactgacacaggtgctgaccctctcatctatgaatggggttgtgagaagcccttatattaatatttgtcctgactctctctcagactgtagtcttacattgttaagggcacactggatcttttgcttgactgattcctcctttcagctctttatgtgtcatacagaacttattatccccaccaccttgaatccatccccctactccatcccaccttcctatttctgttactgtttcccccagtctcccatccaccactctcctaaaggatctcatccatcactgaagcctgttcaatcctcttttttcttttctttcccactgccatgatactaatgtaggtccttcccctgtaactgaactctgtgcctccgtctctttccccctgatccatctcgttcacagtattgcaaaaataatcttcttcaataacatcttccttgggtttttcttttgcccatgaaccctcaatgtctcccatcaatgacaagatcaagtccactttgcttagccttgaaactccagacctccatactctgattcttaggatcatctttccctttttccttatatgaactatgcatatgtattcattcctttatttgtatagcatgctgttacgtctcaaccatgtacctggcagtgtcctggttgcttctgaaaagctaaacagaaaagtccttaccaatgcactttatgatcctggtagcccatgctgctacctggaatgtcctccatctaaaccctaaaccattttccaagacctgttaaaaattcctctgtcctccagaaaccttttctgagcacctggaaccctctttatagtccctactggtcttattgtctgaattaatcatttgacacttaggaattatccattcactcattcaatcatcaaacacacactgaacacttattgtctgtcaggtactataataggtgttgccttacatgtcagtacatttccatagcataataaaaataacatcaacaacaactgttataaagctcgtgtcaggctgggcgtggtggcttatgcctgtaatcccagcactttggaaggctgcagcgggcagatcacctgaggtcaggagttcgagaccagcctggctaacatggcaaaaccccgtctctgctgaaaaatacaaaatttagccaggcatggtggcacacacctgtaatcctagctactcagaaggttgaggcaggagaatcacttgaatctgggaggcagaggtggcagtaagccaagattgcaccattgcactttagcctgggcaacagagtgagattccgtctcaaaaaaaaaaaaaaaaaaaaaaaagaaaaagctcctatgtgtaggcacaaatttgtatatgttaatcctcaaagtaacttttgaggtaggcattattattagtcaaattttatgataggaaaatcaaggcaaagaaatgtttaacaactttcctagcgtcacaagttagaaagtagcacagatggaaatcaaacctggctctgaagtccttgatcttaacccccatgcatcactgtcaggtatgagtatatatggcaaatgtgtgtgtgtgtaaatataagcacatgcataccttcgcagctagactgaactctagaggtcagggatgatgtcccacacttacttgtatccccactaccttattcagtctatgcatgtggtagatacatgaattgtttggatgattggttgttggtacttccattcactgttgaggggcttgagatttttagcaacaagtaggagtgttttgaggtagaaggcggagaagcagaatttcaaaatagacctgggcatgatggaattcttggtttccagtttttaactctgcaagctctgaggacaggtttgtgcaagaaaatgtactgatgtaaaagcccttgaaagtggaagataattcttttctcaaaaagcaaaataaaacaaaccgtattatggttacatggtttctccccccagtcctgtttcctgtcacactgattcatatccattttgctttattggctataaaaccaaagttttggcatcaggatcgtgtatctcgttttctggcctagtatttctatttaagggttttataagttgaatatgaacattttatttgagtggcaatactgcaactacatatgtagtttaataaaacctgataagtacatatttgaattttaaaaacacaggtggtgagttatttgcattttaaaaggattcttccctttacaaaagggtccactgcagggttctattaaatatccaattccccttagtgcatttattatatgatttaatttaccaaaatttgatttatatgccactctaaaggggtagctctcaagttccagtaagcatgggaatcacttgggcaacttgtttaaaattcagatctggcccccactccttcccaaaattctgattcattaggtcttggttcgtgaagcccaggatcttcgttttttaataaccatctccaggtggccgatgtagattgtcagtgaaatacactttgggaagcatataagataaagcgcaatgatagaggtttttacgaggcttgaatcccctcttactaccaaatgtcctgttcactatttagtaaatttaaaaaatattcacgtgggtcaaataaagactcttccatcgctttcctactcacttcttcctgcagctgccaaacatctttaatctcaggggtaaaatgtttgccctttttaaccctctatttgactcttaggtagctcttcagatcttccttattcttttcttttcttttttttttctctctctctgtcttttttttttttttttgagacaaggtcttgctctgtcacccaggctggagtgcagtggtgcgatcatagctcattgtagcctcaaacttcttggctcaagcaatcctcccacctcagtgcccacccgagtagctgggactacaggcatgcaccaccacccacagttaattctttaatttttattttgtagagacagggtttcactatgttgcccaggctggtttcgaactcctggactcaagctattctcctgctttggtctcccaaagtgctaggattacaggtgtgagccactcttgtgagcgtcacctactgaattcatacacctgttctgttcctgttccccttgccacatactccaacagacattttaagaacctttatttctatggaagtttcttttaaccaagtctagggccttttctcctctcttcttactatacccttcccccacaaaagacccaaaatgaattttttgaacaaaacaaatcatgaaaatgacttgttttatcttgatttcattcttccgtgagtatttatcctggtcctagagcaacaaatactaaaactatctatttaaaatattatagtttaatgaaacttgtttgacaaatagaccccctgacatttatggcacatgtatctgtgtatttaatatatcattgatcttttaaaagtcagttgcttgacctatattttgtctctgattacttttctaaatctctagtaatctctaaaaacatttagagatttccatactttttttttcctttattaatcccctatatccctgaattttgctcagagtaaggttctctggagtgatttggatatgtcaaatatctccagtaacaacagaaccaatacaagagcagataactggtacaattggttcctggttaaaaattttttcttcttaatagatttatcaaggcttgtgctttcctgaaccaaggagctcttaatatccctgtttgccttccataataatatagccagaggttctgttatctatttattgggactttacataccttttataaccattcagtgcttggctagtcctccctgatcaagtgtggaggcctttctaggaaagatggtgggggagaagtggaagaagtggtattgttgtccctgggctaagatgacagtgatagaaacagttccaggttgtctgagcaactcttgtaaacaggaacttatttgatacattccatatgattcaatttttgtagaaaagactatctagagaaaaaaaagttggatggtagtctctggaaggtgggattgccattgatatttttatttttgttctgatgatttttcccaagtttctacagtgaccatgtattgctattacaagtaatttaaaagaaagaaacctactttacctggcgtcttaagtctgcttcccaagggacttaatctttaacagatttatcacaaatcctacctattgcacagaacaacggtaaaaggaaagttctcgtgattaggcccagagcagttctgcaaacacaagactgtaagctagaaagccaggctttctgcccagcagcaggaaggctggggtgtccatgtttgttgcatgtcccagggtatgtgcatgtggagtctgacatgtgagcaagcgtgcggcccctgtcactcctttttccactcaaggattaagattgtattgcatttgggattttaactttgtcttctttctttttttccttacccttccccactcctcttccctttctccctgtttctcttcctcaggcctctcccacctcatgatgagtgaacaaggtaggtgctttgtgcttgtggtcctgcagctgcctgaactgcttgcctccgtgcctctggctggtcacagagcctcatcgtcactggcaggccattcgctgcctgtccttcctgcgctgggccaggctggctgcaggaccaccctgcagtgggggtgggggcaccttccttgatgcatcgtggtttcccacccctattgtccccttggcttctccattctccaccaccatttgtcattttgggcgctggccctgctgggctgcatccgagagggaagcatgaaaccaggcatgacggtgtcgataatgggggtgaatgaagctaatttcagagcaaccaagcggttaacttcctcctgctcctccccaggccccatgccggggctccaggctgggggagaggagctgggctcctccctgaatttccctctgctttttgtcttcccctccattacactgcccgtaatgatctgccttccatggtcaaaggaagcccttgtgggtttgactgttttcagttttatataaaagcaaaaaccacctaaagaacatgctaatgtcctcatggcagaatactaactcattatacaccctgaagaaaactgcatataaagatctgtaaattcagcatctgcaacctaaaatattcaaatatgcaaggaatgaactgtgcaggaaattcagctcagctaagcacagggtgggatgtgaatgaagcctttttctcctaaataaaaattttccacattatcagcctaaatcaggagttgagagctgagcctagttaaaattgtcttttccttcacagttcaattgctgctattgtgtttcttctgagccttgggatgattgcaagattggtctacctgccttgccctgtaaccaaaagtctaatttttcttgactatgtcgtgttgaaatatacatgggactcagcacctcttctggaggaccaaagaaaaagggaaagaaggataattccatatattcctgtttttcttgagcttttgaggagggtgggacttcccctcccctgctccctgacattgagtccatcagacatttttgacataaacggcagtatcatcaaatcaaggaactgcccgaggctggaagaagttcgtttatggcatccagttagctgtggaagtgggcagtcgagggcatcctgaactgacaaagcagggtaaggaggaagcctacttttccaatgtaaatgtatcctccagacctaagccaagatcagtggtgtggacttcagaaatttcaataaggagatggtttggtagagaccatatgtcaaaaaatagaactgggagaggagatcaggtgacttctctagtattagaaggggctccagaagaggctgagatgaagtctctgttcttgcagtttagtgagggagggaagggccaacagcaagtgactatgaggtggacatgagtaggggatgtacctgatgttgaccagtgtgcaggcagcttgagagagttaagcacatctctttgaggaaccgagctctatgaattgctggaatttgatggctcacctttggtgacaagttacaccagcaaaagcagactcttagagtcccaataagcccctcctacattcttttttcccctcctacattcttttttcccctcctacattctttagccttatgatcccacgtgccccttgggagttctccaagcttttatagtggcttggagaactgagtgcatcacatcatagggcagagtgtggcaaatgggataggctgatggggacttccttgatcttgatttaacttattgcagacacactgatgcagcatggatatcttggaaggctaaatcccaacactggtatgaaaaacatttggagagcctatattatattccttatgcacacacacagagcttcagatacaaccatgctccgggggaataagtctggtaccttctagaaagagagaaagacataatgacagacatggatgttgtgaattcctcttttgagaggttttcaagaaaggatgcagaattcttctgggtaactggtgctactaatattttaagttgcaacttgaagtttaatctgtttttaagacagtcctttgactgcattcctcttcctttcattctttccatttcctatccccttatctgttctcacccatttgatgattacctaaaaaaccgatactcttcttctcaccagtactcctttccttttccttattccttcaacatgaaaaaaggaggcttctgtctggtttctgctgaatcttaacaatttatttttgtgcccataaatatgtgtggaaatatgtatgtatgttgtgtgtacaacacctatacatgtgtgttatactcttggtcctcataactcatattaatgttaggaaaatacaggagaacctagcttctccgagatgtcccctaatcatttttagattaagtgcatgcaatttcacatacatgtggctgtgcagtacttttgcatgcagactttgtcatgtttctgaggatgggactgagaagaaatgaatgggatggagcttgaacatgaagctgagggagcagccttgctggtcacagcgtttactgcttgtttaagcttccacattgtatgtttgttttgcgctgcctccttaggatgttgcaatgctactgcctttactgttgtgagtttttgttttgtgtgttttatgtctctttgtgtgtttgcagtgtgctgatgtttgactctccttgctctctctctgtctctctctggccgcctccatggtgaacaccatgcttcctctacttaattggaccttcatttctgtaggtagaagtaaaggtagagctcactttatttttatcattataactatcaatctgccttttgaaatattcatgcatccaagaggattgtcgattctgaatacagtccagattataaattaatgcttttaacaacaactgaaaaataagaataaaaataaaaagccaatgctatcatttcccttcagtgcatttcatgttcagtgtttggggatgattctgtgttggcctgcctccctctaaactgagggcgggccttctgcatgatcttgtactctttctatcaggaacgggggagggtgttctaagatcccctcccagtaaatatattgagggaacaggggaagtatgaaattatgtatcattgttgctattatttggaataactgaatttggggataacattggtgggggaaggatgatagatgagaaagggagagaattggtgaattgcctgaaattttatttaatgtggaattgggggggatatttatttatttctctttttttcctgtgttgtttttcctgtatatgtgggattcggaattttctgatggggtgatgggttcagaagggtggaactgggagggtgtgaaagaacacaggaatgaaaatgtgttacacagtcaggaggaagaggagaaagagataacgtaggattttaacttacaaagccagccttttgccaggtaggcagagaaaaggagaggggctgagtgtgcaaacttgcgccaacactctgacatgcctttcatcgcaccacacctttgggtaacgcatccatttctaatcaaagctgtcagagacccgagcctagagaacctggctcaccagctcaaattggattagttgttcaggagtgaagggagaggttaattgataaattataaatatgtatctacatctagtcttccctgtttcctccctaattctccagcccctatctcaatgagtctgtgtgctgtctcttccttcaaagactggcaagtaacagaagtaggaaatgtgttttatgccatgaggatgttgaagaaagaaggggctgacaagttgttgaaaacatggattcagtgacacgtctgtgagatggctatcgcttatttgagttttatgcttttctgggtctttgaaaagttatgtatggttgccttggaagcagttcagtcctttccactttggggttggttgattgcctgttccttttatgctaatcccaggtggcttcattctcagaaatctgtcatggggaacccttaccccattgctaagttggtatcttttgaaaggaggtgggtgggaaagcagggagaggaagaggaataaatgattaaagggctacatctggctgtatctccacctctccactgacgctacttagtggaaggcactggtgacctcataggcacagccaccaatctgcctaggactcaacttttctgatgcgtgtggcactgttgcctcttctctcattggcaatacattagattcagtctctgtctctgtctccttgtctttccctaatcccctacaacatcccataaaatagatgttttgagtgttttttagattttgcacgtgagtatcttattttctttctcggagtcactgctactaccactactagaagctgctgacactttcatgcaccagccattgtgctatatgcctaatgggcttgtcacacttaatgctcataactcatctgtgaggtaggtggtggcattattcttgttttacggataagaacaataagactcagagtcagataacataagccaatgactactaagtgagaatcaaacccagaatctgtgcccctaacccctactctatactgtctttcccggatacaagggtgacctccacgtttaagccttctagctacctctctacactgacctgtcataagttccagcctaccaccttgcattctctgtagcatatgtctctgtaaatgccccactaagggaggcacttcagtgggctcaaagtcaaccttcatgtcatctgcccacaaaccagcttccctttatgatgtctccctgtttgttaacgcatttcccacctgccttatcaccgtggggtgtgaaacccaggaattactttctatcattctccttcctgaaccttcctcctcctaggcaattggtagagagagagcttgttgagactctcctccagaatgtctcttgcatctctgctgtcagctccctggatcagtttccagttagcacttactcaattattgccctctcctaattggtctttctgcctctgttctcttctagtctatccagtggttgagaattgcttaaactctgcggcccacaaatggagtgcaggattagctatctccctttcaaagccttcccttatatggtcgtgtttacctttatcttgctcctctgttaagcttaactacaaaattgctgctccagccaagtggaataccaaataacctctctagaatttcctcatctcttacctttgcttattctgtttctctaccttttaatagtccctcatccccttttttctgcccattgaaaaatacatatatttcatttcttatgtgatattttccttgaatgctccattcagagttgggctcttcctccatgtacctctctaacaatttatatggaagttaattgggacttggaccactcccctctactagattgcacgtacgttgaagacaaatgtattcatttgttaacatccagatgtgtctagcatagtgtgttccatgcagaaaggactcaaaatctctaatcctcttatcttgctgtcatttatcttcctaaaagtgaaaataaagcaaaattaaaattaaatcgggtcatgtagctcatctgttccaaagttttgggtagattcttcttgtataattgtcaaggtgccttccctgctttattttcagtgggcataccccctctgcccacctatcacccctgccagctcccccatctccaaaagtcccaaagtcactctgcttgcatccacactgcattctcctgcctttggacttttgctaaagctctattctctttcttaaatgtccttgaacatgcttctccctcttatccttgaagatccaagcctcctaagtctgccagactttgtgctgtgttataaggtacctatgccaaactgccttgagtcacgtttactcatgtatttcaatccactccccaacacctgtcccacaaaggaccaagacttgtgtctttgccctctctgtcactcattctacacaagctcagtactagggccagagtcgtacttaatgaatgcttacaaaattaagtaatggtttaactgaactaaacaactgattttagatatggggggaggggagatagacaggattagattttcaacactgatgttagtaatgaaatctctctacttactaacatgtaccccttttcacaaccctcatgaccccaaatcactgagcaaaggagtcccaatgggtcatgaagtaagaccacgtgttctggctccacttccctcctcactaaggccttctcttggccctgtgtgtgcaagtgtcagagggaaaattttatagattacaccagaataaacgtgggaaaggtcttgaatttattcttagacatttgtcagagaaaagaaggactatgcctcagatgttgtcattcttttaaagctgaatgatgaagtagtaaatccataatggaaagaattgtcaagttaaatctacaaaactgagcagggtgggtaggctataacaaaaaccactctgttgaggaggccgttgggcaggacatggccagaaacaagcgtgaacttacctagaagtggctcacacagaggacttcagcaaccagccttggtcaggtatttcgaaagcccctgtttaagtgttgagagtatattttggccttcttccccttcttctagtccatttagggattgcccgttctggatgaggttaccaaataccttcccttgaaactgaactcagggcaggggtcacagacccaaaagccagcagggacctgaccagtcttaagaagtagacctggagataagtagtgtcctagtgtaagagaagcaataggtcatggtgggaatcatggcaaactggagagtgcaagtcccatcaaaggcagtagtctccactctgttccagctgatcgctgccatgcaaggatgcaggcacagtcaccagatgctcaagaaaagccagaagtggacgtgataaaaatgtcatctgaaggtatcttctctgtatgtacgtatgaacacacacacacctgcgtgccagatgatttggtgcatgagtcataagtttttgacctttggcttgagaagacaggaggagaaaaagattccttcaagatttcttactggatgtcaatagtgggaggtagtttgattaattttctctttgaccattgctgtgatcagttaccaagaatccttcctacccttggcactaccttcggagaggctggtctgtgtgttgggtaaagttgcttttgtagagtggtgtgggaaagtgtggggagggtatggagaatgcagagaatgacctgggagagaggtatctgacatctttaataacgatcaagaactgatttttaaacctttagggcggccgggcagcagggggatttagtttctttttccttttgctctacagagttttgtattcactggattgcctggtgttgaccctaagatctattctagtcctttaaagttcagaagccctttttgatttgtttatgtgtatttttcccatgtagatttgatcactggccttctaatgctgagctaatcaacactggccaaactggaaagatataatcaagctacatgaatttgaacatgatttcatgtagattgcattttactggtaataacattaagaaagctgatttgaggagctgagccccctcttgtccctgctaggacttgagagccttgaaaataagttactgccttgatagccaactgtgtatgcaaattcctttactaatgccagctactaattatgaaaataaactcatctgtgctctataaatatctaattataataaaataggggcagtattacatttccatctcttgtctcatctgtttctcatccaccactgatttgtcctcttgacagtgaatataaaatcgctttgttttttcaagaagcctgttttccatgtattttttcttctaatgttttgaaagtctgtgggggaaaatagatttattttaaacataaaaagtaaattgcttgattttagcagctctgtgtttttggcagtgatgtctttgagacggtgcttgaaaaatatgaaaagtgtgtttttttcttgtttagaaattttgactggacaccaaagacattttttgcatggatgtttcttggagcattcaaaaaagtgttaatgtgaacagaagatttattaataaaatgtacaatgtatcagtagaacattttaattaaattccaactgacaatacataaaagaaattatttctcagattttgaaacaacatgtctgtttcctcctcctcaatgatcaatttggatttattgattacttatagattttatgtctgcgtatatatgtcataaaatactttctcctctaaggtatgaataatgatctatctgtttgtatagacctttgcttatccagttgagttagttaatcttagaagatatataattttcaactgtagatcaatatgtatacacacataaacttgactttgatagcacctacaggcaaagaatgttttgaattgtgttgtctttaagatacatctcatttgtaaagaattcgaaagagtagtctgatggaaagatacttaatgagagaacaagcaaagtgcatttccccttgtgcttaggcttgtacatgccatggtctgtttcttaggtgtgtagggcagtgtatatctgagtataggtacaatttgcacaagtacatattaataggcttatactggtgtattgtgtttttatgtgtagttgccatttgtaggtgtactgaaaataatagattccagggtgacatgtatcagaattaagcagatcctctgcttcaatattagaaaagcaatgcttatttggcattcaacaaatattgatggagagccaacgatatgctaggtgctaagtacacagaaactgagcaaacatagacccagccctctgacaccttgctcacagtcaatgggagtttgaaaatagctttcagatgtaacaaccacctttcctcaagtaaaaagccttaaatgcattgtttttaatgtatttttatatatgcagtttttaaattaatttttttattttaaagggaaattgttaggtaatcatttagtcagatcacccacgctttacattatcagaatcagaaaagaaaatgtgctttgtgtgtgaacacatagggaattttttatttgcttgtcatttatttgtttattggggatggcatacacagtgcaaagtgtataaaatgcatgctcttaagcatacagcttaaaggttttttttttttaacctgtatatacccacataaataccatccaaatcaagaaatagaatatgcccatcactataaggttccattgtgaccctttctgccattacttctttttctttattggttgatttattttttaaaaaattaccgtttatttttaataaatacatgtattttccccactcaatccaaaattgtgtttatccatgtaataatcagtaggcaggctctagattgcttaactttcattaagaaggattaaccttgtgagacacccaggcagtgtggtttttcactgtgtgtaaatagaagcaaaaatattgtcctcttgtgaggtagctttgccctgtttttgatgaagcgcaggtttccctctatacaaagagaatacctaattgatattattgagtttttctcttttttcctaaggcatttagtggtaagcagaatagcagaggtggaaaagaccatatgctttgtaaaaagccagactaataacactttttgatggatgtctgattgtaaaagtgctgcatctttcattaaaatttacatgtaaagcaagggcagaagcgatgacatgaaacctaatccaacttgcacatcttgacataataacaatcacaagaaactgcagatcccagatggcagcttggcctttgccatccttttaataagctactaactgctaattatttcactcttttgggcaagttaatttactgttgactcttaaagagatactgctctttttttcccccaacccacacaaaacagagaccttccacctggagctttgaaaagtgcttccctgcaggttggaagctttccagtcagttgtaacaacgatggcaagtattgggatgaaaaatgttgcttaataacattttcttgttttttttttatgaatatagagaatttaaaaaatttgttcgactaaagagccattgtgtgcatgtgcatgcatgtgtgtgcgtgtgtaagagcaatagatggagcagccaatgcagggagaagatctgaaatttggagcctatttaagagtgaaagaacagctgccttttaaatggttgctaattctgacaattaatgctgttctgtgagtgtgtgattttctgtgatagcagttaggagggatgatggtgtgtaatagctcatttcctaagctttatggtaatgtagcatagtcaagaccatagaactgaaagagaactgggtcccacatgctctgcagcccttttaaatgaaaccctgcaaagcctgcttttctctgtactttgacctccttaggatgattttatattttagcacagacacagattattaaacgaatgatgtgcaagtgggcttggatgcatcagaagtgagtttggaaaagaaccttgtttgcaatgagctgtctgacaatcaaaatatttacttaaagataagctaatgactatgcctcgcaaatgcctgcagatctattattgaaatgagagtcagtacattggcttgatactataaaaaataaatctcaaacctcaaatactattgtgtgtgtgtgtttgtgtgtgtgtattatacttctctccaaataaaagtctttcaagcaataaagaaatatagaaaagtctctcaacccattttcttgaaatatttgaaataaatttgttactgtaatccattgttccttgttgctggtaagaattgctaaatggcaaatatgcattgaacaacacactcttctattattagtgatatctctgaacctgaacttgataatgtgagttttgtggtccagtattttacctataatggcttgtgtgctatgaagttgatgaaaggactgtgaaactcaaatcaaatagaggctaatgcctcttgcttattaaacctagacttattaaacctatttgcgtattgactgggtaagttttaaatgttctgtttctttaaaaacaatgcattatatggtttcaaaataggcccaaggaaaaatagaaatctgggtgaatttgaggaagttttgtcatcttgtagaacctcgtattatatagcacgttcagccagattgtcatcttccaaaaaaattttgagaaacgctaataatgtttttttttttaactttttctttaggtttgggatatatgtgcagatttgttatacaggtaaattgtgtgccataggggtttggtataaattattttgtcacccaggtaataagcattgtacccgataggtagtttttccatcctctttctcctcccaccctccatcctccaccctcaagtagtccctggtgtcttgttcctgtcttggtgtccatgtgtactcaatgtttagagatgctaataatatttcaagaaaaaaaaactactgggaaaagtaagttctgaaaacatagttctaaactaagcaggtttattgactgtgggacttctcagagcctttgttatggcaatgcaaattacaaacctctgagaaggaaaatgtacatttcaaagttaccaaaatttatttgacatgaaacgcttttttatgattttcattttggatgaaaatagctagaattagaactagttagtgttcagttaaaaacactttggacagcaattttatagtagctaccaaagctaatattataaggcttaatgactctaaaatttgaaggaacttttggattggcttaactcaagtgtctttttaagtacattttctattttgattgggaatagtttttttggaagggttcgtttaaatagggaaattactgcttcctggtaaaatacacaccacagatgttaaaacaactgcaattttaaagatactagtctggttaaaacacttccagtttgtattacctgagtacttaaacagatatccatatagtgagcataaacaatacttctgagaatggctgcttaactctaggaagagctgatcttggcataacatgagaaaactgctaggaactttagtcttatttgctttcaaatttggagcaggtcaacagtcatcatggttatttctctactgtatatctaaggtcattcatcctgagagtctggttatgaatggcttttttttttttttttttttttccagacagtgaacatgtaggtgaaggaattgctttctggtaggaattacttgtttagaagtcattggctcagctaaggattttgtgggttgtcgcagtgcacagctgaggactttgtcctatttatgtgctgtctgttcagtatgaagtggcagccattgatccatctgtagtacaccatttgcctggggctatttatctggttgtggagatgtagtttgctgagccaggcatacgctcccttgtttccccaagtgaccagtaatgagtctttacaaatgccttggcccaaattgttacgagtgaggttctgcagttctaaactaattgatccatgtgacaactgaacctggaatactagatctccaggtgtgaataattctaacctagggtcagcattatggaacaaatagaacagtgagataaatgtgaggacctaattcagaatgctggggaataaaacatggtgggttagagtactgatgttagtgtttgacactcacaagctatacaaccttgttaagcttccttatcctaataagcaaaacgggagcaagaatactagacacttcacaaggctgctgagaggatctattgagacaataatattaaaggcttatggtagagcttagctaacatacataagcattagtttagttatcataaacattaacaacaaacatcagttatcataaatacattttgtcaatatcagcatcactcattaaatatgggaactttgaacatattattcaatctttttgactatctgtgtttttacctgtaaaatgcctacttggtacatttgttctggctaagaattgatacaatgcaggtgaaagtgctgtgcaaattaaaatagtgctacacagtgttaaataataagtagttcatgagactatgagcaccataaaatcagaggcagtatctgattttgttcgtcttggtatatccagtgcctgtaacattgcctgccccatcatagaaacaacttagtaaatacttgttgatgagttaagtaacttcttagcagagttctgcaacagggccagccccaagtcttcctgtgatcccattatgctttcaatagagagggtctttgggtacctccattgcaagagggaatcattagtctcttcctttagaacaagttcatccaaccccaggtctgcaggctgcacacagcccaggatggctttgaatgcaatccaacacaaattcttaaactttcttaaaacattatgagatttttgtgtgtgtgaattttttttctaagcacagcagaaatcattagccttagtgtatttcatgtgtggcctaagtcaattcttcctcttccaatgtggccaagggaagccaaaagattggacagtcctgctttagagcctgccatactaaaaatagtaatcctcataaaacctgttctttcttaggtttttgatagatgtgtctgcttttttttttgtgcacacaaagagctataggatttccttgtattacttgatggaactataggagccatgaagaaaacaaaaacatttggttgggttacttttaaaaaatgctgatttgcttcctcaaatcttagaagcatataatttcagagctcaaaggagacttagaattcctttagtcgattccactgtgattttgtggatgacagaacatgctgagagggcatgagtgatgtgtttgtcactgcacagaaaatttgtagcacaatcgggacttagaacagactttctgacttcagatgttgttttctttctcctcccaccaagttgcctctaagtcctggtcatcttcactgttgatggtatttgttatagatcattcataggctgctgagatcattgttgataatgccatataaggaagattctggaagtttcagtgtgcaaactttctaaaaaaggttatctcttaaattactagtctgcctgggaactgatacaactccagctttcaaagttgtcagtaagctgctttgaatttcagtattttatgatgctttgtaccacttacacagacttgctttgttgatggctttgtcttggctgaagtaagacggtgacaccagttgacttttaaaaagcttttatacccataactttttctttcttgctgtcccatgttgactatttataacagcgtggatgcatgttgagtgcaataaagatgagctgtgatgatattcaccagggactgatttacaaactgttgcttaatagttgtttgcacttcctttcttcctttaaaattagttgtcattttatttgtaattttttcaactaaaaagaaacattttttttttcaagtgagagtgtatttatctttaagccagtatcatttctgggttttctttttaaaaaacaattttttcggggttctaccatgtgtctgatgggttaagtttagtgcccgtccgtgaggcagccttgggggatgttgatgggtgcaggaaatcggttcttaaattgttgcaaaattgccttccttcagactgttttgatcacgagggctctcaagtgtcaaagtcatttgtagaactagatagataaaatgcatgagcactaagctttttttccaggatagaataaataagtgtgttttctactatgtgctccgcctttgatagtgatttgttaaaaggaaaaaagaaaggcaatgatattaaatatttacaagagtgatttagttctattatcctgtgcgctgcatctctgttttttatagtgaaatcagctactgtagaaataaatgccattaaaccagtggtagtgtgaaggtcaccgcctaggcaaggttagagtaatttgtggagagtaatgacttttgtcaactttccagatctcttcctgtttttagccggcttccctccaaaaattataggaaaaaaatacatttgaggattcacaggcttactgtctctcttgcatgccttatgccctttctggccaacctgatagttggaagactttcgtgcacttttttgtttgtttcgtctgtttagtggacagagacaggtctgttctccctggagatgagcagctgcattcccatttactggcttttctgttggttcttgcttgacagtttgttttggagatccagcactacttctttcttagaaatggtttatcttgtctgaaataatcctccagtttccctacttttacctctgcctttctttaaataaaggtttttttttttaacaaaactttctcgtatcagtttaaatacatttctgaatgattacatggcattatccccattttcacaggcaagaaaacagaggcccaaggttacaaagctagttacagagctagcagcagaaccaagataaactgagctttgtctgaccccaaagcctgaggtgacactactatatacgataccatcatttcaattaatttcactgaacctcagttttctcttctgtaaaatggggatgctaatatattattctaatatattctgaattcatataaatagtattacatatgatgtattataaataataagacattattttacttttggtaaaattgagaagtatataagctaacacatattaaatgcctaaaaagatgtctagctctcgttatggttttaatatattccctttcctctcgacagtaacaataaagtgtaattgaatttaacaagtattgagcacaagggatacacaaaatgggtaaaaatcagtctttgttcttgagcagctcacaatagagtaggaagaaaacccctatataatgaattccaaaagcgattcacttttttttcttttgtcttgggctttgtctgtaccaaatgccacttaaaatatgaaagcccttttctgggtgcaagtagtttgtttcctataatgttgagatagcatgttgacattgcagtggtagcgacttgtggtttgtttctctgttagtctgtgtttacttcatcctaaaatccagaagagtgggttgaaaatgggggaaaaacagggatacagggaagtagcaatgtatattactcagggcaggctaactgctatgacaattcccaaatcacagtggcttaatgctaacaaaattttctcacattccagtttgcggtgcagattggtgggtggtgaagtgggggatctctactccacacagtcattcaggcaccaagacaccttccgtcctgtagctttgtcattttctggagccttgtccttctttgcagtctactggcagaggaggagagagcgagcttggaggatttttcctaaagggccatgcctggacatagtgtgcatcatctatgattggccagaactcagtcacgtaatcccatccaattgcaaaggagattgggaaatgcaatttatctctgtgctcaggagaacaggataaggggcctggtggctacagtgacagtctctgccccagtggatgagttgtgttctgtgcttctgtgttctgatcttgtgtcatgcgtattagctttcttcagcccaccttcattcaaacaaaggtgagtatggtttctatgagatagagaatcacttctcattcatttttctattacacacatgtatgtgtattttgtgtatttttcttttccgttctttctttctttctctttctttctttctttctttctttctttctttctttctttctttctttcttccttccttccttccttccttccttccttccttccttccttcctttctctttctttctttctttcttttctttttatttttttttgagacagggtcttgctctgtcacccaggctggagtgcagtggcatgatctcagctcactgcaacctttgcctcttgggttcaagcaattcttctgcctcagcctcctgagtacctgggattacaggcgcttaccagctaatttttgtatttttagtagagaccctgttggccaggctggttttgaactcttgacctaagttgatccgcccacctcagcctcccaaagtgctgggattacaggcatgagtcactgcacccagcttgtatgtgtattttgtattaaacaaaacccttcagagttacttacattagtgtttctcaaattcgtgagaatcacccagggaacttgtgaaactatagactttagttcctgcctcagaactgtaggacctgcagctctaaattattctatgatcaggtaaatttgagacacgctgtgttacagcaaattccaaggaataaaatgaaccgaaaggaagtgtatgagactttaatagaagtattttgttgtattttaaatatttaaaacaagctgcgtttatgtataccaaatctatttgttatacgtagatttttgttgtagttcttgttttaagggatgtgacctctatcttgcatccataacccaaaagtgattgggatcttagcttgagttgatggagtggggccaaatgcctgattcaataggattttgttttattgtgatcactgggtaaaaatatctcagcattttttttcctctttatcgtctaaaaagggacacttttgattaagataattttcttgttgcattaagacaataataggagtacatgtttgataggcctgcttattttttgtgactgacttgtgaacagttaactgatggcaactcattttagtttgtagatatatcttaatctcttgtacgcatagtaaccattacctccatgatgttctgaaatgaagccccttcctgtaaagctgtgcttttttctcttgtagctagaggttggcccattgtactattggaatggatgtcagagtgtggataattctgggcttgtgatttttttctttctcctattttatctgcctctttttgtgtctttgtgagcaagtctgtgattactattgagtttttttccctaaatgccagcaattatctcacaggtggagggattaggaaagagctgagagaaatgcactgggtttagaataaaggctccccacccccactttaaatatggtgacaggagggagtgtagagttgggggcgggggtggcagacagctgtgggggtagggtggacaatttgcttctgatatttaaatccctagaaggagtaaaggaagaaattcctaaggaaagaaagaggaattaaagacctatataataagatattttggggttattgtttcagggagctggagatgcaggaagggaggggcagccacttttcttaacttgctttacctgcctctttatctgaaaggtgtttgtttgtttgtttttttcctttggtctgacaatttatttttggaggagaagggagctgggagggcctaatatatatgcccaggccaagagaattttggtgagacattccctttcttcccagcagagaatgatttatttatttgatatgtcagttaggatgctttcagctgcaaagaacagaactttcaactcaactgccttaaacaacaaagggcatttatgggctcagtttctaaaaagtccagtaactcacatgatatgaccaagacctagtgtttgtcttccccattttttggcttgactttcttggtgttggcttcatttttggcagctcctgcccatgtgattttaagatggctgatggccattcccaggatgatttggtttttggtctttgtaagtgagagagagtaacactcttccttgactgtattagtcagggttctccagggaaacaaaaccaagaggagatatatatgcacatgatgattgttatgaggaactggctcacgtgattagggaagctgagaagtcttatgatctgccgtctgcaaactggagaggaagccagtggtatagtttcagtgtgagccctaaagcctgagaaccgatggtgtcaatcccagtctgagggcaggagaagactgatgtcccagtgtaagcaacaaggcagagaaagcatattcccctttccatagcttttttgttatagtcaggtcctcagtggattagatcaggagtctccaacccccaggctgtggaccagtggtggttcatgacctgttgggaaccaggccgcacagcaagaggtgagtggcaggcgagtgagcattatcgcctaagttccgcctcctgtcagatcagtggcaacattagattctcataggagtgcaaaccttattgggaacagtgtatgcgagggatccaggttgtgtgttccttataagaatctgactaatgcctgatgatctgaggtggaacagtttcatcctaaaactatcatctcctcccctcttctgctttccccctgccactccatctgtggaaaaagtatcttccatgaaattggtccctagtgccaaagaggttgaggacttctggattagatgatgcttgcccacattggggagggcaatttgcttcactcagttcactgattctaatgcgaatcccatttagaaataccttcccagacacactcagaacaatgtttaatcagagtactgggactcagttaagttgacacgtaaaattacacttcacaagtctaccccttttcaactcgacactcatctatatctccttaaatgatacttaatctataaataaagataaaaagatcataatttcacctaacgtgatacacctatcctgagtataattgaaaatgcactaaagagttggttttcctcctacagtatattggatttagggggaggctggatatttgactccaaattttgggaatagggaaatggatattgagttgcaaatgccagctctaccttgatagaataactttcaaaatatgaaaccaaacccaactaggttcttaataaggacttgggaaatttgggggtgtatatttttcatccttactatctggctgtgaaatcatcctatttccatgagaaggggatgtcaaagagggagcttgtgtgccagcataggtaacatttggaagcagagaggtgaaaggggaaggccattggtatcctagcatctgtggaatcagggactcagcatcttaggatcttagttcattgacatgaaaagaggcagggaaatgtctgtgggaatggagtgaatgccaggcccaactttcttaagtggaaactgctctgatggcatcctttccttctgccttgatctcaggcctccacttaggtcacctgacatggattgctattgatggatagctgactgaggcagccctctagtctcaagtgtgtttttaacagagtggctctcagtaaatacctgtttctcaaatgcctcacctcattcacagagtctttctttttagctgctgctcaatcagctgctatttcttagcacactgacctaatttccaaccacacatttcatctaggattttgaggcagcaacatcccccccgattcccccaatgtcactgcgggtgttagctctaccttgacttgtggccacagttcttattacctgccttagccgtcagtataacaaggggcagccagtgtggcaggtagaacagaatgagttccctagggtgcaacaactggaaggatgtggttatcaggttcttcaaaccaaataccatgagagcaaaggcccttcttgaaagggctgctgcctcttagcaccaaggttgcatttgaccttctcaaactgctttctaggccagtgtgtctcacaatctaatgtgcacccgaatcatctggacatcttgttatacgcaggttctgcgtggggagggttgaggtggagcctaagattctgcatttttaacaaactcccaagggatgtccatgatgttgctggtatgtggaccattctttggagggacaagtctttgaggccatcactttgaatgatcttgcaagtgagggcatctgcttctttctctctaataagtcagaatgcaaagatccaaaggaggagaacagcactccttggaagtagatgggagagctgggactcagattcttaggaattagttgttatcttcaggcaaccacgcaagtgcctgctgaaactcaagccttctcatcccccttggataatagaagtggggcgtcagtctgcctctgtctccgtgtctgtatgggaaacatggaggtcatggcatatatgacaagtgcacatgtgctgttccattcccacaaggagagaaacatggggagtagcctataattctgtgtctaccagactcctcttcatgctcctaaaaaggcctgtttctgtaacaaatcatcaccatgaggacacatttctgggggcctacatgattcacagactgcccattgtaagttgcttgtaattatcaataggaaactcatgtgacccgtgagccccaagtcccacccccttgcccaaatttatcagggcttgccttacacactggtggttgctatgggcttgggtgactcccaacagcgatgacaatatacattctcagtaacctggagctggcactgaggctgcagccctggacatggggtgtcctctgggtataatctcacttaactttactctgcaaatgcaatgttggtcttgccatccctgtgttgtgttcagtcttgtttgatctcactctccctgttacccatctgtataatcccctgggaagaatgagatctaaacaaaaacaaaggagaaaatgcttaagaaatataatctgactgtctaacaaagcagatagttaagtctctggtggactcctttgttttatttggactagagggaggaagaaaaaagcttgggactgctgctggaggaacagaagtgcattaggaggctcatatttcacaactggttgccagtgtctatattggctgatggctctggtttccagctggcggtggccttggttgaaacatttacctggtgtcttcagggatgctgtatcaacagctgtaagtagagctagttattcagtctgctctgagaaaggttaaagtgtgtgtctttggcttccccagggactaatccagtaacaggagagtcagagagaacacgtaccacttgggagggggtttcttcaccgggattttcgttgttattttagttacaaatggaagcatttaaaacctaaatctgtatttaggcagtgagaggagaaacagggacggaaatgaattatttatttcatcactggggtcctggaagcgtggagtgggcgttaatctcctttgaacaggagcctctgggtcgggcttgaggtcgtctgtgtgagatctgaccttatctgctcctggccagacatctcggctttgaggaaattgacttgagaatactccaaataaaccctttaccttgttgttcagaaggatgtgaatatttacctagcatatagtcagaggaatcgaaagtgcttgtgtctgtgatttcttttaatcccattatttcccagtagatctgacgggagacctagaagcaagggaggagtgcctcacgctggtggtcaactgggagttgggggtaccgtgtggctttcctgtgtgttgtgctcaaggaatgtgtatctgcacatttatccagtgagagagctgcttttgttcccatttcactgatgaggaaatcgaggtttaaagagattcagcatctcacctaagatcacccagccctggctgggtgcggtggctcatgcctgtaatcccagaactttgggaggccgaggtgggtggatcacaaggtcaggagatcaagaccatcctgcccaacatggtgaaaccccgtctctactaaaaatgcaaaaattacctgggtgaggtggcgcatgcctgtaatcccagctactcaggaggctgaggcacgagaatcacttgaacccagcaggtggaggttgcagtgagccgagatcgcaccactgcactccagtctggtgactgagcgagacttcatttcaaaaaaaaaagaaaaaagaaaaagaaaaaagatcacccagccctaaattatccctgctgggattgctgggattcaagtccagggtgctcttcataaccccatcttgagctctttccagtgtctcgtgcatgctgctactttccatctgccccaaggcagcatatctaataaaaacattgaaaaactttcccaaggccaggaagggagaagtaaatgggtcaggggttacaatcactggtaaagacagaacaaaacccatcttcataaagaacagtgatttgcccttttaccctctcctgtcctatttctgtttttttctggattcataaatatttgtatgtgaatactcttgtatgtgtataccctctctttcctttcgtcttctctgctctttagagggcacaatgagtagttgtcattgttttttaaaggttcctgcaaggctctctgttggatttagtttattcttgctaaaacatttctgagacagctgttgaaagcaactggtgctttgtacatttctgtcttcagtcatcaaggtggggttcttggttccatggtagagagaaggaagggttgggtgtacttcttcctttcacagttttgaagtttcaaggtccctaaaccgagtcaaaagaggtatgtgtttgaaaatgctttatgcctccaaggtctcataggcttcaaaacattgctggtttccccttccagatccattgcttgagtgtctgttgtgtgctgggcgtcggagattcagagaccatgttccttgataaccagcaattaccttctgaatgttacctgagtgcagatgaggaaggtctctgaaagcatacagggcgggggcttccaatacacactccctactttggactgttcaccactttgaataaaactaggatcacactcccattccttccaaaattcttactcctttctaccgcactaccctcaatctgcataccagccctttttttttaatcagctcttaaattttactctaatccaagccaaaaaattttattgagccttcatgggttattaggggcagggggattgcataaatgaaataagccaaaccctcagcttctgaatctttacaatcctttggggaagatgcctgtcaaatatgtaattgggaaagccacagatgttaggaaaaggggcaaagtgtactagggaagttgagtaaggaggttgcactccctggctattcggaaaggggtgatcattcctcctggactctagtttgaacatcctttgccttgctcttgctactccatgaaaatgcgctctggagtccaagacctccaatagtagtattgtgtaatgttgtagccttatttaatgtctctttgttttctgattgtctctgtcatgttgcttgccgtgatataccaccttctgtggggctgcagacaaataaatcctccctcaactctgtgctccatgtgtcactctcccaatgaaaagacttttgatggctgcccccattccctagaagataaagttcaagctccttagcctggcattcggtacttcacagtttggctaacctcagctcccatcccacttgctgaaaccttggctagaaccccaccctgctaatccatgatgcttcactatcccaggtgccgtcttatctctgctcgtgcttgcccatttatcagggacatttctcccatttgtagccatatcttgaagtttaatttgagcctcacacactctgtgacactttgcctggccacctcaactccttagaatgtcgtgctgctttctagctgcaccatgcattagctatcttccccgcactatgcctttctgcaatgtgtgtcaccttcgtgtctccccaaccagtctgaaatgaggctgggcaccttatttcttactccttatggccaccataatgcctctacaaataaaggcttgatgttataggagaggagattgactgtatctgattaactagtatttcacagggtttaacacaatgcttgggtgggggataaataggaaaagaacttgaagatttaaagtgaatttaaaattgtatatatcttcccaaatatcaacctacgaacatgataaaagtattactttcatttttgtgggggatgaggtaccgtggtatgggctacagaaattgagattggggcagaggaggaacagtaacacagaaggaggtgagttgggaaagaatgaagagagacctaaaatcaaagtgccctgtgtgtggattgagaagccctggatttaagtcctaactctgcatttctgactgcatagcttgggtaagacgcagcacacctggagcctcatctgttgaagggggatttaacccctgccgtgcctgccccaggtttgttgggaaattaaatgtgtgcagtttgtaaactgtaaagtgtactgtgaatggaagggagtggtgttactataaacagcatcatcatttatcagctaaatcctccctgagccatactgtggcaggggaatagatcgatggataggtctgctgtgacaggcaggaaaagaccagactggagggagcctgtggtcagatcctgtaggccctcccatctgtacgaatattctcatgccaaggaagtgcttccctaggccttgtgaataaagataaggtgcataggtcctaaccttacctgtgacaggtacaagtgggagcccagtcccaggatcctgatggtcagatatcaggttttggggtataaatatgaacacaggaactagcaggagaggtgggttgtggttctagatctgtacttaccagccatgagcagtttctccaaatgtagtattattaatacaatgagtgccaaggatggagtgcttcatggccattatctcacttcatccttgcaacaacactatgagctgggtgtatagcaatatgtgttattatcctcctactacagacaggagaacagggtcagggattgagactagcccaaggtaactagctaatgagaaacccgagctgggattggaacccaggcctgagctcttaaccactatgctctgcagccttcaacctcttggagcctgtcttttcatctgtattatggggataaacccgcttaccacatggggtatgaggatctgatgagagaatggacatggaaggactgtgcacactgcaaagtgtctatggtacattcactgagcacctactgcatacctggcattgctgtgggtactaggacatagtggagcataggacagctgagacacctgctcacaatgagatgtgttctacccatgatctgttaacagaggaagctgtcagaaagtgggaagaaaaaaatgcagtgatctgagagtgtttttgttttcaaaaaggaagaagtcctgttaattgccagtcattgccctttaagtctaccttcattcattctgaagtataaataacaaaaccaaattaagagattacgcaatgtgggaaatttacagagacagttaaacagagaaaagcaaagagagtgcattaataaaaggacaaatcatgtcaggacattctgatcactacagaaaagcaaatcacagttctagaaggtgagaagtatgcagtggatgtaatatatctggattttagtaaaatcacttgatggagaaatggcctgaaatcttgcctgagaaattaattcaagctggccaggggggaagccatgtcactcagaatgagaactggctgggagatgggagtgaaggttgtgatgacaaatggccttagctttcggggtgtgatagggtcaggtgagaagacccaatttggccatcatcacttaatgatctggaagaacaactaaactcctggtactgacattcatacgtgatgctaaattgggaggtgtcatggcgatggcttgtggaaggaagcatagtataagaggtcagcagtcaaggacaggaggccgaggcaggtaggaacaatgcgggagagtacaggcaaggacaaatggagggaatttccttgaggacaatctgcaaacattaaaaaatttgcaaatatataaaaattagcatcaggacaggaatgagacaaaggtccaaggccgtccaaggatttatccttccataatttgaactgaacgtgaggaatggacaggggttatgtttcggggtgtgggaaggcacctgagccatggtggtccttatagccacagtgttgcataggactatcccttcctctctcttcagtgtgatagggtcagaggcagaagtactctgcctttcacagtgtcacagattgcttgaatgaatgtacactgtgcacatttgcattctgcctctactactgaatctgtaaaatgggagaataatagtccttactttgggaattttatgaggaatagacaaatgtgataccctaacaccatgcctcatatatggtaagtgcttgatagatgttatctattattatcgttatttttatcattatcatcattgccctgtgtgcccagtctgtacctgatggaatggcctttctcattcaagtaggggaagaaacatccagagaacagtttgaaaaaaagcatagggtgtaaaaaaaaagcctagggtcaggggatctagattctttcccaagctctgctatagctgaccttgaatgagttgtttcatctctctgcccctgtttccatttgtacaaacatctggggcttgacctggtgatctctgaggtcccttctagctggaaaagtttgcaaatctatacaaatatgcaaagtgagttgagctttgtattattcaagttgtcatttttgagggatatcttctaacacatctcactctatagacttattctttacccagcaattgccatcctggagagggtgacaaacttgtatacttttagcactgaaagccccgtcttccagaaacccccttagtcctgggcaaaccaggatgattggttagcctgcccataggataactgctagcctgttggaatgttgcatggaagtctaaatacacatctgcaagaatgcaggagttttactgagctcaggggagccatccctagaaagccacccaacattttttatggggagtagagtgatcaaagttggggaagtgtgtgcattggaggtgccagagacacgagtacctatagaatgatatctgtggccatacctcatctctacactgacccagtcccactcagggttcttttggctgcttgcagccttaacatgtgctgagaggagagtcatgagtctgagaagggcaccatttcacaggataagtaaatgtgaagttactctgtgaaaagaatgagctgaaacaaggagttggttatgttttccacagctccatctggaataacatgttccgttttggattcctcagggaccagaaaggtgacaggttgaagggactgtgagggagtcacgcatgtgattgacaatgtagaggaagtaattgaagggaaaaaaagaaaagaacaaaaggtatacatcgtggtggggtgcacatgtttgtgcagggaaagagaagttaactaggacatccaggagcagaagtaagatgaagcgtggtgttcacagagcaatggaggttgaggcaaaattcgctctgaagttacacatttaattctgcaaatatttatttagcagctacttactctgtgctatgatctgttctaggtgtggggaacacataaagatgattactgccctttctttgttctagtggaggagacatgcagtgtgtgtaattgtgaacagaatggatctgaattcgaatccagttagtctgcttactcacacaactcactgtgttgccttgagtgagttacaaaaaaaaaaaaaaaaatctctctgttcctgagtttcctcatctgtagaatggacataatcatagtactgcctgttatggttgtgaggattaaactagtttatgtattttaagtacttacaagaatacttggcacatgatccatgttactaatattattattaagtgaactaatgcattcaaagtgctcagtgcaagactcaataaatgttagatattattagttattgttaatggtatatcgaaatgaggcataatagaaccatgtttgaagtgcaaaggcaacaaagacaaggcaaaatcacttggggtcggggaaagaattaatatcacagaaacctactgtcaacctaaaggtgatatttgaatggggataggaaggatcagtagagctttgcctgctgggaagaaagggaatcctaggtgaagcaaacaacatgaacactggctcatctcctgaggttgtagctggcaatttgatcttttattttttagcttcttaggagctttttgtagcaattcctgctgcatttgctgatgaatacagcaccaaagacagtaagttatttaccctacttattatttatagctcaaactccaggcttgaactcaacgcattactttatggtacttcaactataagggatttttgttgttgtttggcagacgcattgactgattcatttattcactcattcagcaaatatttatggaatgcctattatccgcctactgctcttgtagatactgggcatatagcagtgagccaagaaactgctgctctcatggagcttccatttcagaggaggaggcaggcatcaaaagaagaagtatatactacatcaggcggtgataaatgctacaaagaaagataacaggagtgggagcctccctcacagaactgaaaacatgcactcagcctaggcctgggctcaggatctggaggtgctaaaggaggatccaggggaatgtagagcagttggaggtccagccgctgcttcatgtcagtgaggtgaatcagcacatcagcaacaatgtgtatgggctgcaaaatggctagtgcttttcctctatcctccaaattgcccaagagtcttccttaaggccctctctaagcagaaacattcaagaaagagaattctgggaaacgtagttcagcctagccaagttgacacataacaaagccgacacacaggggatggggtgggtggaggctcctaagactcatcttgctctaaatcatagctctctacagggaaggcttctgtgagttaaaatcccaattgttcctaggcagtctaggaaaaaataattctcatgagacgtttttgactgttcgctcaatagacgatgactctccagttaaagctatttctcagggtaagcttcttttgattttccagcaactactcaagtacccagatggtaactaataggagatttgattcatgttccctggggtggaagatgttgagttgcatcaatcatcattaaccacagcatcatattcaactatttgacgcaatagaattcaattgacataattattccatgtaatagaactaaaaaatgaaacaagagcttgtctctgggaaataaaaaaagctaatgcaaacgtaaagacaactatccaattgaatttgatcatttatttagtcactcatttcacaagtatttgtgttcaacataggcacattaatgggctaagcatggaggtgatgcataaatatccacaccagtccttcttgatatcaagaattttccagatatgtaattttaatccagcttaagagctagggatggagatgctacaagaggaagtgtgtaagtctctctgggcaaagaaggaaaggctttgagataatttcttacctgcatataagatgatatccccactttcaaagaacttaaaatctagttgaggattgacatgtatacatggcaaggtactatcttacaactgcaaacctaggctgctgaggaagtgcagcaggcatttggggtaggggtggggacaggattctgccacatggtctccatcacagctttaaaaaaaccagatctttttgtgttcattccagaagctgcacagtttctagagacttgtcttttcacaggaaatatcctactcagaaatagtgtatttggcaggggactattctcctgcaatctttgcctttgtctacagcatgttaaaatgagagagcttctgattcataggagttataaaaataatatagtaattacaaagttcactttcgtgactcactttgctctaaattctggcactctacagggaaaccttctctgagttaaaatcccacttgctgtttctagtttgaaagtgtcaatgggtccacaattttgaggttgaatcattctgcaacacgagggcttgagggggaagcttggggacctgaagaatgacagttttcagtgtttgtatatgtctctttaaaaaagtaggaaataaattggctgatttgtcatgattacatcatgtgtaatacttgatcacagagtaccttgttttggatttgtatttatttttctccctcctgctcctatctaattgccctctccagaatgaaggcttccactgccttttggcttcattaacagctttcattttcattaagagctttgcgctaatggactgttataaaatgcacagttgtttcttgcagtcactgccaaatgcctcccattctactgacagttttgtgcattaggccaaaaagaagggggaaaaatccagtaggaattaatatccaaggagaagatataactacctctgtccttgaggttttttggggaagttgggatcagcacctggaagcccatgactgttttctctctgctctttaaatgtttcttgattcgacaaatgaaagaagacaataggaagctcatttttctcataatattttggaatttgagggttgttgagaattagacttacagaggcttcacaagaaggaacactgatagtgattagatttcatcaacctggctccaattacacatacaatggttattattgcagttacgagcatcaaaacagcagatgctcccagggtaatacttggtgtaccgtccaccatatgcaatggaaggctcagtattgatgtatggttgcagagtttgatttctttatacggtagggtggtttctgtactcctagtgacacagttaaacagagaatattttaaaatcttaggaatttaaagaagcttagagataattaatccaatctcctcaccctttcattttcttgaaacagagagagcttgaggaatgggtaagtgtgacctagatgtcagctgcagtcaccttgaccctaagagatttggctaagcttgacaggagtccccacaatgtgccttatgagttaaactctgcactcccacccccattctctttcctgttctctccttctggtgtttttttcctccagaacactaagaaaattcttcctctcatttcacatggaaggagcccacctaatttaggtgggcttggtacactgttcttccactctaacgcctttcccaaacaaatttaaatctttctcagacaattagtagggaaaaaattactccatcatattacattaatctcagagctaatctaaaactcaggttttaaatttttgattccatgctgtttctacaatataatgtatttccttgaaataaggtatgccatagtgctgaaagccattgccatgtatgatatacttgggttttttgaatttgtccagtcttttccactttgtaggaaggttctaagattagccaaccccttaatgggctgatatctagaatcaagacttaaagtttttatattaactaattaaaatctttgtaattatacacttatgtaattgatatggatgttaatataacctcattaatatctttgcaaacgaactgatagtatatacaaatttactagcagtttttcattactctgtaagtacatacctgttgccccttattaaataaaatatatcagtacatttcctaacatttcccagttttatgttcttgtatatttgaaacattggagtcagaatctgtttgcctttgtgtttgagcatgcaaattttaaagggtcagggctctagttcttagattttatgcaggatattttgctcatcatgagtctataatgtcaaataataaccacaaggatttacaaagcccagtttgagaaaggtcaccaaaatatatgagttgacttttagagctgatactctaggcttgaaatgaggatgattaaatcttaaaccttcactaaagtttggaagagcctggctggatttgagttttaaagaccgaggcatgattagccttctttttctatcatacccttctcccagtttagctactgagcactgtctttaaaagtactgttgttttaataaaaaaaggaacaaaagtattacctcatcagcatttaaaacatgaaaaaatgggatggagaaaagacatgagatgaaaagactagtttgaaaatgttccaagatcccaagatgcaaacatgcaaagcatcatgggggcagagaacgtggccgcatgaggtagctccaatctcagcaacataaaaaggcagagtgtttaccaaatctttgaaacagctttattcccagaaaggaccaattatagttgaatataatccagaaaattgtgattgaaggctacttcctggaacaggtagcctgagagttccaggatgtgtgagttgaggaggaaatgctgttcacttccaaagaaatgactggtgagtagaaggcatctgaaggacaatgactgacatcctaaagactggggagtgtgcagagggtaagctgttatcatttgatgtattggaatgagagtgcttgattactcaatataaaaatagttttgtcctgagatctggaatttcactctgctgcatcaatatacagttttacgggcaaccttaaaacaaggaccatgtaattatggccagccaggccaattagagagaaaaccatgaaacagctgggtgttaactatctctggaggttgatgttgagaaaaaaccatgaacttcagagctcagtagacttgagattagggctctgcctctatccttatcaactgtgtgactttgggcaagtcatttaacctctctgaacctcagtttcctcttctaaaaagggagtaataatgaagacctcatcatggtgttttcaaagtaaattaattggcatacataaagcagatagtggaatacctggcataaggcaaaccctcgataaatatcttttcccttatctcccttcaattcttttcttcctccccatcattgttgccctctttgcctttggcccctatcttttaccatattttcttttcttcttctttttttttttttttttgatggagtcttgctctgttgcccaggctggagtgcagtggcatgatctcagctcactgcaacctctgcctcccggtttcaagcaattctcctgcctcagcctcctgagtagctgggattacaggtgtgcgctaccgcacctggctaatttttgtatttttagtagagatggggtttcaccatgttggccaggctcgtttcgaattcctgaccttgtgatctgcctgccttggcctcccaaagtgttgggattacaggagtgagccgctgcacccagcctgtaccatattttcttagagctgtcacactgcccccttccatggaactggctgataaaggctttaagtgtcatctaacccaagtgtacttcctatactgtaatcttttaaaggcaactttgaacaatttaaaaattattgtgacttaaaggaatcgatatctaatgatagaattctagttcctggcttactggtatgggagacagttttgtctggggccagtcccatcttggtatcacactttgtaattttctgagcatttgaccttttcttcatgtggtctttgtcaacctacttgtaaggccagcctgcctataaaatggaggactctccaggaccactttaatcggaggtcagaataatttacagttactgtgccagtggtttgtgtgcaatgagatcgtgcatagcttcattagtgagtttactgtgctgggcctttccaaagattgtgtttcttgatttggtccctggataaatttgcaagtgctaatctagttgttgctggagagcatccaaacctaaggcagaactcttgctccttggattgttaggcattagattggcagggtcttggactctggtaaattctgcaggcctaagggagactggtcatccagccaggtgtagggtaaaggaattattgggaaatatacagtaagggaggcctgtgaggtcagtaccttgagggatttgtgctgtgacttccaagtccaaattcaacagagatttagtgcgtgcctactgtgtgccagacaccattctaggaattgaggatgtatcagagaataagatgaacaaaaatattcctgcctttgtcggtcttatattctactgggagagtagggtagagaagtacacacataaagaaaaatcacaataaatacactagctagatacatagatagatgctggtaggtgatatgtgctatagtagaaacaaaatagatccgagaaagggggatttggaatgtgggtgagagatggaaaacaatttcctataaggcagttagagagacctcactgaggatatgatatttggatatttgaatgatgatgacatagggagggacctacagattaggaattagagtgggaagtggttgaggtgtgtgtggggggcatattttataagcctttgatggcttctgtgaggactctggtttctactctgagagaatggggagtcaacagagggttctgtgtagagaatctctcttgtattttaatagtatccctctggctgcagcagggccatttgggaggctcctgccgtaatccaggtgagagattgaggaggtgggtgttgggctagagtggctgcagtggacggcgtgagagtggttctattccagttttgtttggaaggtagagccagcagtatttgctgctggattgaatatgggtgtgagaagagagggatcagtgagaactccaaggtatttatcctaagcagcaggaaggaaggtattgcctttcagcaagatggggaagactggaggaggagacaatttacagggaaagggcaagagtctagcttagtcatattatatctgagatgccagatttgggtttgctaaccaagaggagatattgaggaagcggttgggtttgagcttacagttcaggggagagggtcaggctggagatatacacttgagggtcaccagcatacagacggtgattaaagccagggcactttccagaatcacttctttcctgtgagagtttcctaactttgtgtcagaactcatattccctaagggtggattcagatcaagcttctagccataggtcccttccacttgcttctccatctatctgaggttcatacctggatgggttccattgtcttcccatggaagacgggagggctcctccccgaggatgatacaagatgatcccctgggatgtaggatgaacacgtcagaatctctgtctttgatctcgtctgaagttgtgtgtgtgcgtgtttgttttttaaagtgcttaatatgtgtttatattttataaattatttgttcattgagaatgtgtatttaaaaacttcttactagcaaagtgggagatttgagaagtttacgtaccacagtctgaatgaagaggagagggaaactttgttaattctggacctctcagtggggatgggtagtaattagggagtcctatttctttgtccctgttggagtaagagggacactgagcttacctattgtagaaaagctgcctttttaatgattctgtaaacacttattgaaacacctactagggctggacggagcagtggaaatttttgccaacattatatcctcagagcaaccccaggagtttggaccagagaatcgctctccatgaaggaaacaggaatggggaggtggattgaaggtgggtacaggggatacccctcacttcataaatgaggggaggcgtcatcccaggctctcaccccaaggccactcttctctagtttcaagcccacccttaccccatgaattcctgatttgagatgttcaacttctttccctctaaatcccttttgagtttcagaaaacattctcctgaagtctgcacttgagatgataaaaataattgggcaatgttaagtggtgggcagtggctcccttgggaggaaaaaggctgttgcattattttcccttttttctctcccttttaagacttttataggaaaacctcaagttttacccattgtctgtggccctctggcactctgtcagctcttttaaatcatcagttatcttttcatatgttgatctcttatttctcaaggtagattgtaaaagccttgagggccaggactctgcccaagctgagccaggctccctttctgtcactctcccctatcttggtgccttgcacctggcaggtgtttagtaatgactgattgattgattgatattaatgtataatatattaattactagtatcattagttcaaaagctttgattatgagtaaaataaagtagacacattaattcagcagttcccaatagccagcagctgaaaggaaggcagctgtggcctgattccttcctcccacctgcctttagtttgctgagcataaaggggaagtgttgtctgcagctcttggaggtctactgaggtctctgagtcatgacaaaaatgacttcagagaccgaagcactctctgcatgaaaagccctgtctccagctccatgaaatgtaaatctgggaactgctggggaaggcacaggcagtcaggtgaggctaatgggaaaagcctgagtctagagagagcatcgctaaggtaaccagaaccctaactctgaaggttttgcctgggttcacaaaagccttccagctttccattttaaaaaggaactccacaaagtagactcaggaaaatgtgctttggagctgtggtcttcaaaatccagagctcctcagaatcactggagaagcaagttaaactcagattcctgggtccctcctccccacccccatagagtatgattcaataggtttggagttgtggccaggtatctgcacttaaaacggaagttcatttatttgtttttgggtgtaagtggttctagagaccacgctttaaagaattcctgtatttgacttggagttgcagtgaggctgggacctgggttcttggaattggtctgattatctttaatgtgttaataatctctttgccagtagctgcattttcttatgcgtccttggtcctgagttgactcgaagctgtgcctctcttcccaggcctgagtttgaactggtattttagaaggaagaaaggagacaaactcattatttagcaagtgtgtaccgagcatctgctttgctcctggcagtgttctaggtacttgggatgaacaggggattaaggtcaagaccctgctctcatggagctgcttctattctaggaggctcctgggtttatatttatggtcgagaagggactccttctctgaaactgagcaagtatatactccacaggtcttaagtggacatcctctgctcattgtttgatagatgaggagagtaagtgcctctagaggttgagtgactcatctgagatgattgttagtaacagaggtgcaatgggtggggtgtcttttcagctcccagcatgttcaaagggtcagtatccacatatgaccacccccagggttccctcttatctgctctcctatgagaacagttttggggaagatggctaggggacagcatcctgttgtgatgcaattcattggactgggacaatgactttctgctaggctctaagccaggtcattgaatcctatgggtctctgttgctccttgtgcaaattttggtagactttggatcatctgtatgtttatagcacaggtcctctctgattttctagaatttctaattttttagaattttctagaatttagtctaagcccctttctattttttttgtattttctagaattcagtgcccagacttttttctgagcacgcctggtgtctgcctcagtggtgtcttaaggtgcgaaataataactagcagtaatttcacttactgggggaggcagcaggcatgccttcacagtaatggacatgtatggaggtggagagcaaagagccaaatggaagagggaggtgcagtttccctgactgtacagagggaattacatgacctccctgcctttaaccttgagctcagggataccacttattttcacaccatccaaattctagcattctggagcaaagagctgctcacttatcctagttatgggttttactgggttgtaggtaccagggataattagtgaaggtggcaatgggggttatgagagaaaaggaaggtaatgggaacggcagggacagaaaggaagggaaaacagctaaccagctttggggatgataaagtaaatgctcacctaggcttagggacagcctcctgcctccatcacagtgagggaacaagggagtctttaagatattggtggctatgtgcctgtgcatagggcttgctctggggtttcaaaggctgtctcaccctgtgtgttaggcagagcactggatattttctctaagcactgaaggtctaaatgaaatttagctttctcaaacatcctaattatttctacattcctaaagctctgagaaggccgtatatatagtactgatattgttctcccaggtggttggcgacatgatttttaaacttcctttgtttggaggaaccagagatgaacagatgaatctggaatgtttggggcagcaatgaagtatatagttgggtggactcacagtcaaaaagtctaagatcctgagggtcatgactgactcagcttaggctgtcatggcactgagtgacttcagagtacccagtgggaaggtgggctggaggtacatggatggggggatggagaatggggtgtgagtattgtgtatttctctcttccctttggtgtttaggttgttattgctaggagtgagccaggtctttctgtcctcaaagactaaattattcccagaagagtaaatgccatccacagacatattggtgacttccaccagggctgcccttgatgctgtatctctgtaacatttccctcaaagcaacaccatctgacatggtagccattagccacatgtgactacatttcaaatgatgaaaatgaaaaaaacaaaattcacttccccagtctcactagtttaacgtgtggccagtaactaatgtgatggacagtgcagaatggtagaacatctccatcactgaagaaattcctattgaacagagcagtcttaaagtcctttctagtccaagggtctagagcccctttgggcctgtgtttgctggtgggggaatggggactcttccttatcaatgagccctgtagttgtcccatagcaagccacctgatggatagcctagaagtggaaatgacagaaagggcagaggttggtgcagactagctaggtttccaaaagtagataaaataaactacagtgcaagtgggacaaccgacccactcagatgcttggggacaggggaagtatatcagttatttattgctgcacaacgaagtgatggcttataacaacaatttatttttcgtgattcagtgggttgactcagaagtttaccccaagttagactgaaaaagaaatgagagcagaatccaggaccacaaaaattaggctttggtacttttaggtgaaaattttggacttaacactttaacacttgaaagggcctcttcattgtggtttcattcaccttatttagaaatgaggaaatccagtttctgagaggttgtgtgacttgcccaaggtggtggaggtggttaggctgagcctcggatctaggctcctgactttgaattattggctttttgtattggaccaaactacctctcaacaaaaggggaatattatggcctcattgggtctgcagtcctctgtggtcaaacaagttgctcttcttacctgagaaggacagataagggcaaatagactatttgcctaggggctggctgctcccactaaaccttgtgacaccttagttggagaagctgaaggaaagaggtaaatattatttgttgaatctttaccacacgtgaggcactttgccaggccttttaaatatattttcgcatgggagcaggcattattttttcattttaactgatgaagaaactgaagcacagaaatgtttagaatcttgctcaaagtctcaaagctagtaagcagatgggttataaatctaggtccatgctactctagagcctgatgtccacatcattccatagctctgtgacaaacagacacaggcccttagagaggaggtgcacatatagcattgactgtgtctggtggtgtgtttgggaagggtgtcagcagagcctgggtcacccttccttagacataggattattctagccataagtgtgaggagaaaaaatagctttgaggtaaggtggtcaaataggactgctgatttctttggaatccaactgcttgagtcaagaagggattgcctttttgaaattgctggcagacaggagctcccagctaatccctcctctgtacacatgtggacccttaagatgagttccttggatgctaggattccagatagaagtaaatatctttaggcagccatgttgaccccagaaattagtgccagggactttcttaaagaggattctaagattttctggaattcctgaagaaaagtagatgaggagcactgagaagaagaagtacgtctcaggtcacccagttaaatttgaatttcagtgctccttctccttttcagtgacacaaagggagacagaaagagagatattagactctcccttttaatccagaatcttcggtaactggaagacaagttgtagtctaccaacagctgaaattcatggaggcaagaatgagtgagaagatagcaaaaaagaaagctgttcatggcttagaaagcaggtctcatccaatggactgtacgggtttctgggagagaatcatgccttggaaatatccgttcatcaaaagcatagtttgcatctgcaagcccgaagggaaactgagaaaaccagccaccaacttggcaggcaacagaattgtctcctccaagatagtgagtggaggagagaaggctgccttttcccaagaggaccagtccagcccttgttaggccatctccgaagatgtatgtttcctttaccaggtgtagccttacaggaagggactctttggagtgaagccaagtgtctactttgggacaggggaagtatatcagttatttattgctgcataacagatggcttataactacaattatttttcatgattcagtgggttgactcagaagtttgccccaggtctattgctggggtcacttatgcagctgcattcatctggcagataggctgggtttcatcaaggtctctctcacacatccagggccttagtgttgactggaggctgagacccttggttctcctccatgtggcttctcgtcttccagggtctcttcttgcggctcctcaaaccagaaagatggcctgggtttcctgatagcatgttggctgggttctaaaagaatgaaaatagaaattgttaggcttcttcagggcaagacctgtaactgacacagcatcacttaagcccacttctgttggtcaaagcaagtctaaaggcccagccagattcatggagaggagaaatagatgatatctcttgatttgatgggtggtgtgattggcagccacattcgaaggcaaactgttataggaagtaagtacttttatacctgcttagcccaaataaacgatagcaagctttccctttggtagggttgcattatttagcaaataaaaatataggacactcggttaaatgtgaatttcagataaataatgagtcagttttttattataagtatattccatgaaatgtttggaacatgcttgtagtaaaaaagtatttgttttttattagagattcacatttaactggacagtttgtattttattttgcaactttggtaatagtggctttccgagggtgagattctcatgagggcataagtgggtgttttggggggaattggtccccagaatttgtagtccaagacatgggtaatttgaaaaagcctcctagggcaatgcttttcagactctcatgtgtgcaggaatcacctggagattctggtttagaagtttggggtagggcccaagattttccctttctaacaagctcccaggtgatgcccatgctggtccatggaatacaatatgagtaacaagaagctaggtctgtaaaggcccagataggaaatatttttggctttgtgggctgtagagcctcctttgcaactactcagctggtgttttatcaggaaagcagccatagacaatatgtaaaaaatgagcgtgactgtgttccagtgaaattttatttccaaaagttgagagtggataggatttggcctgtggctggctgtcatttgctgaccctgagttaggtgattctcatgtgctcccttctgtaaagataatctctggtgcaaggaagggaaggcttgtactagaagtctacgatttcaggagttcagaaaggattgcactaaatcccttactgccaaacacagatttctctctgctcgtaattattcagatcttcaactaatatttggttctctattgaaatgcaaattccctgaactaggaatcctgttaagctgataaacagtctttacatcccagagtgaatgtatttaggatcccttcttgaggggacagagaaccccagaatagggaagttgggctctaactcactcatatgtttgcctagagtaggccagctggtttttaccttgctctctacacgtaaggtgtgcttgccaatgtcaataactaaaatactcatgttactgaaaggtatttaggtgtgtgaacaagatgttgctttatcaactgtccaggtttgcctgggcctgcaggatttcctgaaatgtgggactttcattgctgaaaccaggacagttccaggcaaaccaggatagagagagggagagagatgtcactgagctctcaatcaattcccacaataatgatttggtgacaacacagcgtatttccactgaactcaaaggcagttagaagagtctcaaaggaatatccattttattttagttgaacttgagaaatacatgccattctgttctgtacttttagggaggcattgttatagggaatacaagcacagggttgggaagtgcttgctagggccacatttcgtggccctctgtaattaggtgccaagattgccgagggtgacattagtggagatggtgatagtaataataatagttattataaataaccactaacatttcttgggtgcttacatatatgtcaggtaaattgtatgtttcacattcattatctgattaaatgttctctcagcaaacctgtgagctaggtactattattttctcaattttacagacaattaacttatggtttagagagttgtgttgacttgtccagtcacatagctaatacattggtgttcaaatgcttaagaccttgaattcttaattactcattactcatgtgtctacagcaccaaagcctttcctagattttctcttgcctctagtacccctttcctggtccccacccatctctgatgtgatgggaagcacacttgctatgtgtttttgataggatattttacttcactgagcctgtttgctcatatgcttaaaaacagggggtggttaataacactttagattgttcatttctttatctactccccctgcctcccactttttgccacagtcataattatttcattctgcagggtgattctctgccatcagagaaagtttggcatagttcagtcgttctcaaagtttggctaccagactagccacaactgggaactgttagaaaagcaaatttcttgagcctcaccctagatctactgaatcagcaaatctagaggtggggtccaacaatctgttgcatggtaaagcttgagaaccatgagtataatgaaaagagcttggggtcttaaatcaacacaaccaagttgaattttgcttctaccatttgggtgatgcttacatcaacaccacactataaactttttgagcctttgtttcctcttctctaatatggaatatcataatctcacagttctatctatgatgagggtcaaataagaaaatggcacaaaactgaatttaaacattaaagcatcaatgttgacattatccatctgtgggcatctctcccaaatcgctcatgttctaccttcctactgatgtataaatcctgtagaaactgatttttggctaagaaagggtaaaaacagccagataagtaatatttatatggcaggccactatctttagagtactttcaaatgattttatttaattcttacaccagttctgtgaaatagaattttaagggagctttgagtttcagagtgttaatgacttgcctgagttgccactgcaagagtgtgtgacaaagctaaggcttaaattcagtctcaattaaaaatctggtgcttcctctagatcactctggttaaagccagagacaaagggcaggcagctgccagcacaaaacctcctccagcccactgttctccaccttggccgcacattgcaatcacctggggagactttaaaagtctcccaaccaattaatcagaatctttgggcatgggaccccagcatcaatgtattataaagctccccaggagattcagttgcaatgaaggttgaacacatggctttaagctccctggcagttctattaggcagtgatgcttgatgcttgctgcacattagaatcatctgaggaaccctaaaaaaatacctgtgcctggcctcatccccctgggttgcaacgtctgcagtgggtggctattgtggctattgttattttgaactttcttgatgattccactagatatccagggtcgagaagcacagcatgtctttggctccaagcaggcttgctagccctcggaatgaagcccacctctctacttctggctttatcacttggcaaaaaagcacttgttaaaaatgcacacacatgtgggtttgccctcttcatggttcagcaccagaatttaagcagctggtggacaagacttatccttggaacaacatccaacattcctaccctagggcatattggagtctctcaaccaatgagggcccacaaataaagcagtcagcatttacctccagcaactgcatttaggattctctcacatgacaacatttcctaaacaggtagtcaaagccagagaaagagatgctgactttattaaaattcctctgggcatgcccactgactcacaacacatgctcattaatacagctgagcaggcatcctcccttcctcctgcacgtgaggcacatacacagaaagccgggctaccactggcattcaggatgggggagctgctgctctgacgtggctgctttcgtttgagacttcttgggggcactttgataaccaaatctgaaatggacactgagtctacctggccttgttctgaggtccacttttctctgaatgatggtacatggacacgacattgcttatcatcctgttcactgtgcacctgctaatatagcgttcattgctgtatggttttttggaccttctgggagtgcttgttacaaatgctggtacctagaccccatctcaactctcagattctttgaaagggggttgggaatttgaatccttagcaagctccccaattgtttcctaggcctttgaaagtgtgagagccactgcactaacaactttgtcatggtttagaaagcctggttccaccagttcttaggaataaaccaagtgagagccttgcactgtagagaattgtgttgggagggtatgaatcaggtaagtcaggagaaaagggaattgtgagatgtctagggaatgggataagggaggacatgcacatgcgcatgtgtgtgtgtacatgtgtgtgcctgtgtgtgggtacatgcctgtggcccacacttggggggcagctgttatatttgctgcttaggtattcatagccaattgttttaactgttccttgctttattagcttttgccaagtagttcagcttttactaagggcacccgggtttatggcagcaatatttctcacagtgtcagagataaaatatcaagctaataacagactccctgctaatgtaaatcgcacaaggaaggcagtcttgttcaggaggaagtcctaccagggaatgctaagtcttacgattttgaaacagcagtcggtgggattggatacactttgcacttgctaagaagataaaattaatgatttgtgttaagtggtagcagctgcagaaaagagcattttcctacacctgcctcttcccaagggacttgggggctcccagaggctcagacaaaggggcaggggcttaactgtgggacttagggagagatttcctctctctcctcccctctcttttattaccacttctcagtctcgatggatatagcaaaccaattggtttcccttatgggttataaagaggaacccgttttgggatgttgagggatctgggaaataagtctcctggcaatttctgagatttcctctcttcttcctggttacatccaggcacctgctgggcaaaccggctgccacttgttgcaaaaaatgttgacaataccgagggaaactgagacttgaaagaactggagggagcaaagtgctgcttttctgtagcatcaggtccctggggacaggccctgagtgttgtacctactctagctctgaagggcctggggcagatgtgtcagggacttctgagaagatggggttgttttcaaatgggaaggccattaaaggctttgggacacttgggaggctaagaggggatgctcaggagagggaaaggccatgggtgctggctcagcaacagggatctgaaactgctgatgctctattgagacctgaagcacgggtgatggggaaaagcaggcatcttctgatgcatgattctcccagcaaccagaaggccctacaacctctggctgatctctgactacagtcttgactgcggctcttgcccatcctagggtcactggaatcagatgtccatcttcccaactccagaaggttggcctaagtctcatgtcctttgtatttgctcctaaaatcaggccccactcttacctggggcctggtctcctccctacctggtctcctggtctgcctcagtaattctcataatcacttgctatttccactggggaaaaattggagggaaatgtcagctccgtgtgaatcaagtcagcttcattgactccttgaaacagttgcagtggccctgtggaatagggggcaggtattagggcccccattttctgggtgaggaaacaggatcagggaagttaaatggcttacattcacacagagaacacaatacaactggggtgagatgagctcttctgacttctcaatctgtgatccttctaacaccccaccttacccaggggagccttgcactgttactgcactgtctgcacctgctcagataactctgcccaaaccacctaacccaccatgcctccatgccacaggacatgtggttgagacacaaacagctctgagactaaatgcctgcccccaagtgagctggagacaatgaaaatctctacctggtaacccagtgggagggagcaggagcaggtggcatgtgggcagaggcttgtccactaaatgtggaaagaaaagcagtcatgtttttacgtgcagggaaggaatgaggactttgctgacagcaaagggtgatggatggtgtgggagactgcatggggcgtgagtagtaatgtgatagagggtgcacattacaggcaattacaatttgaataagttatcaatggaaagaagtagaggagtggaaaactgttttattaaccccctgaagttacgttcacagcattttgaaaaagtttatgaattgccgtcaattacaatcccggcgacaaatgcggatgctgggagaatccctgattgtagcttctgtagcaggcaatgttttatggggacaatttaaaacaacagtcttatgtattttaaaacagcaaaggaggaagaaaaaggaagtgctcagggagcatagtgaatttacctgctcgtgagcaataaatcttacttatgatttttcggtgttatctgtttttcttcttttgatagtgtacaacatttctccaggcatactgcctggggctaagatgtgtcctgtatgttatcccacggagtgttttaccaagccactccctggatgataatagagctccaaatagagacaagacaatgtatactttctaagctgttgccacgctgaaatttccccttcattcccctacccatattcccatttccagatagcaaaaggtaaggtggaatacaagacatgcatccctgcttgaggactcccacagagctctgttgtcctccaacagacctgaccctgttgtgccacaaaactctctgattatttattatcttcaccaccaaactagagccccttgaggccttagtctctgtgacgttgggaacagcatttagcttggaatcaggagtccttggttgtattttgagagctgctgcaggctggctgtgtacttagtatatcagaagctcgtgatttcctcaccattgaaagggagataagattgcccaacctccctggctcaaaaggttggataataagaagtgagagaagggaaatacaaagaagagtggagtcgttgcagaagggtttgtggagggggcgagagggtactaggatgctatgtggtttccatgtattacctcatttagctcataagtatatggagtaggtattcccattttgtagatgaggaaactgatgttctgagagattaactgaatcactctaggaaaaacgtgtcggaagtcagttgagcccaggtgtgcatggcatcaaagctcatgtttttcaccacaccaggtcctctgtgttttctcagatacagaactattcattaccatcacctgggaacagcttggaaatgctaattcttggctcagcctacacctatgcattcagaggctacggttaacaagattcccaggggattcctatacacattctaagttgagaagcataaaacttggggacaaaagcctcccctatttgaatctgacccctccatttgttggccagttgacactgaataagtctgtactttagtttactctttcaagggcttgcgataaggattccaagatgtggaaatgcctaacacaacattcagctcaacacatgaaacatgaagttcactgctcatctcactaggtgtggcctgtaagtttgctcaggaagcatgggagaaactaacatcttattcttaatcttcactcttcccccatatggttcttggggatgaggaaaatgttaccttggagtgtaaggctgcgtatcattctttggggccatgcttctcaaagtgtggtccccggaccaacagcatctgtatcacttgggaacctactggaaatgcagaatctcaggccagcaccctagacctgttgaattagaaactctgggggcggaatccacctctctgtgttttcatgagctctgtgggtgactgtagcaccacgactttaggggtttggaggtcagacacctgagaagtagctggtgagggtaggatatttgcaggtgctggactccagaggctgtcctttgtggcagaccccaagtgctccagtgggcaccgaggtcatgttacaactaaatgatcatgtaaaggtggtcactgtgcagagggcacacaagcagccaatttattaaccaagagcaactttctgtaaattaaaaattgttagtgatcagttttgaagcgttgagagcctatcagggaccacatgcctggaatgagcatttaccatgtggtgcctttagaagctaatattgattctcattattttaaatgattacaaacattgcaggtgttttgtaataatctccattgtctaattagaacatgcgtgaaatgagctcattgtgcctgctaacgaatattggttcgaacagcagagctctggtgcaggggcaagactggggctgtctggccaagttgccggccaatgttacccctttttctccctaaattatgaatcctggggatacaggacattttgacaggcagttattcatggggaggcctaacctgatttgggcctgctccagccttcagtgcctattcccatcaggatattagctgggaaatgtggaatgagtgtcagcaatttgggagccctttcttcctttccgagtccccatttatcttcttccacaatttctcccacatgttcattttaaagtagctctctatctaaatgctttaggataaatctggattgtgtgtcactcattttagctttcaattacatgcggtctagttataggctttcagttgcttcatgtcttagtattatttctccagcaggactgtaagctccttgaagacaaaagatatgtcccatccttgctttgcattccccttcaaggactagcaagtgcttcatagacactcaatataggatagctgttgttaccagtattattcctagtcattgtcaaatgaatgaataacacaactcagggtgctactgtgtgctcagtgggtgtttcatatttgcatgcatattttaatttactaattgaacaaaatttactgagcactaattatggcatggggaaagtgccttaggacacctagctcctgccaacttgaagctccaaatctccctagggagaaggcagttagagagtggtatggtaactattgaaattgttagaagagggatggggcatggtggctcacgcctgtaatcccaatactttgggaagctgaggcaggtggatcacctgatgtcaggagtttgagaccagcttggccaacatggtgaaaccctgtctctactaaaaattcagaaaattagctgagcatggtggtgcgtacctgtaatcccagctactccggaggatgaggcaggagaattgcttgaaccagggaggcggaggttgcagtgagccgaggtcatgccattgcactgcagcctggacaacaagagcggaacttcatctcaaaaaaaaaaaaaaattgttagaaaagggttctctgggaggctggagaaagagccctgaatgcaagctaggatgaccaggaaagattgctgagcccaatgctgaaggacaaatagtaaggggagggggaaagggcaccccaacaaaagcatgtaggagttggggctttggggcagtgaatgtggccagagcagggtatgcgtgggagacaggcagggactggtatttggggccaaagagggaagcagaaactggattatggaaggttttgtctaccatgcaaagaagctaggattttattctgaaggtgaaggtgaagggtctatattaagacagttagatttgcattttttcaacaatttaaaaaagatttatgtttcagaaaaatcaccctggtaacaatgtagaggtggaaacatgaggcagggggctcattaatgacctgtatgagaagggatgaaagtctgagctcaggcagtgagatggagggaacaatgtagacatatttagggtgtgagagtttctatacaatgtgagagcattatatgcttttctttccttgcttctgaaaacattaaaatagaaaaatctggagaataatacaaacccctaaaaccccattacccagaatgaacaaatatttacattgtatcttatgtacttcagatctatttttattataaaaattaaaaaaaattacaggtaaagtttctccacttagttccatccactactccattgccagaggcaatctttgccaggaattggcatttatcacagtagtccagactttcctatgttagtctcatagttaagtgttcataaacattatatagtactcacagaaatggtttctatagttttctgcaaattgttctacatagtgttgatatgtttagctctagggcatctatttttgcctgctgtatagtgttctatcaataaatatactacattcctttcttctagtagtagacatttagattgtttacagttattagcttttgcaaacatttcagtttttgcatacatgaatgaggacctttctaggatatatactagaaatggaatttttagtcttaaggaatacatattttcaaatttattacatactgccgaagactttctgaagtgattgtaccaactaaaattcccaccaatagtagacgttctctttctccatgtcttctccaacacttgctattatgggccttataaatttagccactctgatgtgggtgatttttctttgcatttctttgattaccagaaagaaagagcaactttttatctgggtattggtcttgaggttcccttttctgtgagttatttgttcatatgctttgctcatttttctcttgggttgtttgtcattatttttcctagatttgttggaattctttattattctggataaccactcctttcactggaaaggattatataatatctttcccagtgtatctcttgtcatttaactttttggtatttttcttttttttttttttttgccaaaaagaggttttaacattttgatgttggcaaatttattaatttggctctccataggttgtattttttatgccttattaaaaaaaatctcctcctatttcggtgtcataaacatagtaggcattgccatacaaaaattagccaggtgtgttggcgagcacctgtagtcctagctatttggaaggctgaggcaggataattggttgaatccgggaggcagaggattgcagtgaaccgagatcgcaccactgcactccagcctgggcaacagagtcagactctgtcttaaaagaaaaaaaaaaaaaaaagatagcaggcattgccttatattttcttctaatagtcttaaagtttttcttctgaccattaggtctctagtgcagcagaatatatttttgtgtgtggtgcaagaagtagggaatatgattctcttatttattttcttcctttgaaagccaattaccccacagtatttgttgaacaatccatcccttgctcactaacttacagtgctcttttcactatgttcccagctcctctatatgtccttatctctggaaggtctctttcctggctcttgctctgtgtgtttccactgggtaagcactacaaagaagccaacactttaccctgcccccatgcccatgtagcaccattggtgaccttctcctagtaactctagatagctccagttgagtctgagcccaccatgacccctggttgaagaaacctggtctcctggctgggctgtttattggcggggttggggaggggtgtgggatttaccctccacactgtcaacaggctttgtgcggacatcagggcacaaaaagcaactccttggattttctgccatctcagaaatcactttgagataagagagatttgtatttaactgagagactgagtgaggacataaggggaaaacatctcagtggttgcaagctttgtggcacctgagacctagatgtaagcagagagcacggctatcagctgggcaggcccttgaggggcttgctgtcatcaggaaggctctgcaaaggcacagaagtcaggcttcatctttctctaacttgggggagagaagctgttttgctcccctcaaatctgcatgcaatctgctcctgtcaacacagtgatccaagagcttcagccattgaaaggaggatgggattgggctgggaatttctgactcttccttaaggtcatgagcagggagtaaggatcgatcacattccctgcaaaaggggtaaaattctagattcttaggactagaaggacatgccagatgatcttgtccaacatggatttttattcttatagatgaggaaaccggactggagagaggctgagtagctggtgcaagttataatgctaaggaaagtcagggaaagcacaagaccccacgtctctggttcccacacacgttcacttttcactgcagtgctctctttgactggggtgtcttagagtccatttgggctactaaaacaaaataccgtagattgagtggcttgtaaatgacagaaatttattcatcacagttctggaggctggaaagtccaagatcaaggcaccagcagattctgtgtctggtgagggcctgctttctggttcatagcattttcttgctgtgtcctcacatggtggaaggggcaaggcagctctccggggactgttttataagggcgtagtcccattcatgagggtattactctcgtgatctaactacctccaaaggctggggtcacattggtgatcaggtttcaacacatgaattttgggggaacacaaacatttagaccctgagaaaaaactattttgaagaaaaaaaaatctgcaaacattttaaatgtatatcccttcctctggtggcttgaagaggataaaggagtctaggcatttgggactaagggagagacagcaattccagagatgtttgtacctggaaatgggcaatttctatatcctcggagatgagcctcaggggaggtacagattgaaattcgtaaggggataaaataaaactacagtcctgaacttctggttcctcatagaaaaaggcagtcacagtgcactgggtagtttatgaaggctgacttcagtttatgattatattccttaaaaaggccattcataaaccagacctttaaaaatgaagtcctttattttttctcagtgacctgcactattatttcaaaagtcttctagcttcatttctgattgatatttacttgtcattgactgttcacactgtagctttaggttcttttgttgccgtctaatagatttgcccaaaaggaaagctactattaatgaaaatctgtttgaaataggaagcatccatttgaaatacgaatgatcatctaatttacttatctctgtatcttcaaaaggtggaagcctctgtagacatctggagtttggaagagaaaatggcatagtatcacatccattgtattccactggtcaaagcagccataggacccaaagcagccataggatccagaggacacagaccctgtctcttgatgagagaagtatgaaagaatatgtggttgccacacttcctttccctgtgaaattcagagcagacatttgccccagactgttgtcccagcctctcccatctagccactcctagtctattgaaaccaaatcattcatctttgagagatgagatgccaaagtctcactgcctctttcgctccccatgcagctgaatgcttagtactcagtcctaagacagatacaatctcgaatgatcattgggacaattttctaaagaattgtccctcagctgttagaatacttttggatacatgaagagttctaggactaggtttccctgtttctagaagagcttacatcaccttttggcatccagtgtcttaccatgcctgaaagatgtgtgtttgctaaacattctctctttattgcaagtgactgttatggaataaaaattcaacaaccagtaagaaggtttatgtgctctctgaaggaacaaggactagaaaatctctgcagggaccaggcttttaattgagtaagacatcagtgtaaagtaagaaaacagaggtagtggctaccaaggggctgagggaatctgttctccaggttgagacctgagtggtcagcacacaagtctcagggagtgacaccgaacaaggtgaggcagagaaaccaggagaccctaccttgaaccaggtaagaagaaagaggctgcagcccctacgtatgtgtgaaccctccccaccttttgaaaattatccattaagccaacattatctctttgcctggatcatgaccatagactcctaattggtttcctcatgtccttaactaaattcatgttttcaaaataaaatattttcacgttaaatccacctttctcccctgccaaagtttccaaaacgcttaggatgaaaacaaaaccatataaggctgcctatcttgttcccttatctctccctttgagggagcacagtgagagatgggagaacaagataggcaggagctggcttgtgcaataggctctaaccatattgactttttttttttttaatcaggcctcatatgaacccatttctttcagtcatagagtcttttttgtttttgtttttgttttctcctgagacagaatctcactctattacccaggcgggagtgcagtggcacaatcctggctcactgccacctccacctcaaactgggttcaagtgatcctcccacctcagcctgccaagtagctgggattataggcacgtaccactatgcctggctaatttttgtattttttagtagagactgggttttgccatgttggccaggctggtcttgaactgctggcctgaagtgatccacccaccttggcctcccaaagtgctgggattacaggcattagccaccacgccctgccaacagagcctttacatacgctgttccctctacctagaatgcttttccttttctccttttctgagattttacggatacgtcatttatcaatctttaatacatgattggttaggagagttgaggcattcagagaatcatataaccgtaataggaaaagggctagctccagctgcttccagcactaggcaacagttgagctccttcattcattgtagcattcaggtttgttccatttgtggtggaagttggctaagtctgagggcaactttaaactttcctttaaaggcagcctcagagacaggtggcgaaaaatcttaacttagttctggagaatgtttgatgagagaggagaattttacaactgtgattgcaaagggaaaggccaattgttgacacagaaattctcacccactttgccttcatgggcttggttggccctctctcttctctgatgatcttacaagccttaaaaaatctctggatcctaactttctggatattacgtagatgtgatttatccagggtcacccagtgagttaataagagagatgggactagaatccaagcctcttgacaactagtccagcttgcccttattctcctgatgaggaatatgggcaagtcaggaatagatatgagatatttcaattctatgcctcacctcaaacatccacaaggaaccaaatatacattactttcctcaatcctagaaaggaacaaacttgggactcctcccaggtcttcagtgactcccatacccctttagtccttgcttccacctttgaattctctgcttttgcattcacccagtctccctccaagtggaaactcattcctcggggtaatcaatgtccctctcagccagaaccccgttaccagggaaaccattccaggcagccgactttgactcattgagatgcagctgcagaacccagggcctgtgtaagggcaactgctatcagagtgggcagtttttggcaactctggagtgtattgtaccaaatgggacatagtaattatgtatttgtggctttcattatatgccagtttaattgtcacaaattcattgttgtttctaagtttttattttatttttttctggactactcagcaaaaaagggaaattggtgccatagggcaggtgtctttctggaagagacactcacttggatgaaaaaataaatgcagtgacttaacgtcatttgattggtcaggaaattttccctatatggcaggggaacaaccctgacatgggtgcctctgggccctcaccaagggcctagagctgtgtcaatatgaaaatcgacaatagaaggtgaattgggtttgacatgatgggctgtcatcccccttgaagacaggggtgtattagtcagttttcatgctgctgataaagacatacctgcgacttggcagtttacaaaggaaagagatttaatgaagaactcgtggtttcacgtggctaaggaagcctcacaatcatgggggaagacaaggaggagcaagtcacatcttatgtggatggcagcaggcagagagagagaacttgtgcgggcaaactccctttttatttttaaaccatcggatctcacgaaactcattcactatcaagagaacagcgcaggaaaggcccgccgccataaatcagtcacctcccaccaggttcttcccaccacatgtgggaattgtgggagttacaattctagatgagatttggatggggacacagagccatatcatatcaagggatcttaaaaagacatggaggtcatggtcccttttctttttaggctttgtttccctactggtgaatttctggttgtgggactataggtttctgaagttggacgttttttctaaaatcacgtctttgccctgtcccttgcccatgacagcttggaagcatgtcttctcttattttaagcatagccaatacagaaggcctcaatataggcatggaatagttaagctaggtgattttaatcatttcaccaggaagaattctgtttttaccaaagggcttaacattggattcactaagatagccagctcttcacatgaatctatgatatggtgaatatggtcatcttaaatgcaatttttctggaagtttgtcaattgtatgttaacaatatgttaacaacagcaataataatagcaatagctaacttagattgagtgtgtatgatatgacagcatcctacatcatcttcttcagtcttagagcaaggtatggttgcactacatctcatatatcccatagaaaggctgcagagagagagagtctctgctcagttctcaagtcaggtgagttgagggggttgagaatataggacagaaaacatgagttccagtcctgggcactactcttactggtttttgggtcctggagcccattgcttaagctctttgaaccttggtttcattttggaaaaagagagacagaaagtcaaaagtgttttgtggagtgctgtaggggtggtggtaatgaggatggtagctaggctaacatttactgagtgtttaccatgtactaagtgtggttgtaagtaccatgtgtggattatctcatttaatcatcacagtaattccatggtactttattagctcaattttcctgataggaaagtgaggcacagagtggttacacagcaacaaagttgtggaaccaggattctaacccatgagatttacctacaaagcattccatgtctctctgttgctgattgcatcagaattaataactttagtccttgctgctattctgagcgggctggtataaccgcttgcttcaagaacactaaaaagagattggcttctccaatgcatgttgagtctaagattcctggggggatgtctcatttttcctgtctttactacgtcagctcatcttagtggctgcatttgtggctaagaacgtttgggtagctacgcatccagctggttgctgcccagctaggatgcttggatgatcatcctcatttgatcctgtctcttgggataaatctcaggctttgggcttggtgacagtcagattctcctgccttaactgagcattctgttcaaagatcactgtggcttggaaggaccttgtgtcatgcattattcagaagggtagacaagctctgggccagtgcccagaccttggaagaatgcatctggtagagccaagaaaattcaggaaggggcctcgcaggaatttagcatggtctccattgctcaagccatctcttatttttggtttgtatggtaatacatgtatttattataggaagagatttacattcttttcctttatactaataacctaagccagtttatgggcataggtaggtggagaaatgtaattcattactgtgtaagtgggtctacagcccatttagtagggccattatatatttttttccagatagaatttatttaaagaaaatgattttcaaagctgatattaagtcagattctgtgacaagtacgcagtggttctcaaccttggctgcacattggaatcaatggggagctttaaaaaattctgatgtatggttctcagccccccagagagtctggttttaattggtctcaggtgtggcctgggcagtggacgtcttaaaggctctccaggtgattctaatgtacagccaggcagggcaggctttgtggataagcaactgtgcagtcacagagggccccgtgctcagaagggccccatacttggcttaatgctctgccattggcttcttaaaattcttaataattttccaacaaaggattacatattttccctttgtgctgagtcctgtacattatgaagacagttctgcagctagagttgagctactgtattagaacaacatccccatataagaaacactccttgcatgccagctgatggtcctcttaggagcaacatgtcaatcaagcaaagcccaggagggtgtggacgatgccttgataatattgtaccctgcggtacttacttttcaagagactttgaaaaaactgttcctaagatagttgttaaccttgctctgaagtactggttgggaaatacacacttgtactgctagacacagtgccaagggcctggtgtgagtctgtctatctaggcgggtctctctttccgtggaggtgttggcaggtggactcgctgtggttgccctgcaccctcctgccttctccagaaccttattctgtcatcaatatccccctgtctctcttgaatttttaatctctccctttcttctggcacttttccctcacctaaaaataacttttctcaaagtactatacccttcaccaataaagttttaggaacaggagctgcccctcaccaactccatgtcgtcataaccattccttaactctttgcagcttagctcgcaacaccccagcttcctgaaagggctttcttcaaggcttctaattccctcctgattgtgaaaattccttatctcagaccccatcctgagcttctctagggaacttgacagtgtcaaatgacttttccaccttcttaaagatgcaagttcatgggccccatccaggctactgaattagaccgtctaggggtcggggtcctttcactgtttaaaaaaaaatctattccagtgattcttaggcatacaaatatttgagaccactgctttatatatgtttattgaataaattgcaccctagcacttgtaagacttgcttttagtttttaacataaggtgtttgctttgtgtctaagttatgcactactgataggtggttaagagtaatgattaaaagcatgagctctggagccactctgcctaaattggaattccagctctgtcatttactacccatgtagccctgggtgcctagtttctttatctccacaatgggatagtaatagcgcctaccccacaaggttatgctagatttgggtaagttaatacacgtaaggtacttagaacaatgcctgcacatagtaagggttcaagaaaaattagcttttaaattgtatatgtatgctttttaaaatatatttacatttaaattttctttctattctattcaaagctaaagttaagaagatcagcagaggaactccaaatctgatggatttctatttttggcagctctccatgtagttaattgctcctgatgcagttacttgggaaagttgtcttttccctctgagtttaaagccataaacctcaaccactttttcctcaggtaccccaatccactgaggtatatgtcatcctcccaacagtgatgatgatttctcaccccagtggttctcagctgatgctcctcagccaacttggattcactgatttatgatcatctatgatattacagagagcctggtagtgttgggttaattttaacatggccaataagaaagcattcaaagctggagaatgaataactgtaactgaatcttagccccttctgaactaaccactttaggatcactgggctgttacaaaaaataccagtagcatccaggtcccaccccagatcaatgaaataaaaatctctgggcatgggtcctgatacaggtatatatcaaaagcttcctgaatgattctaaagtgcaatcagagttgacagtcattgatgtagagtaagacataagattccatattggtaaggaaggaatgggactaagtttcttgggaaaaggaacaagccctgtatctgttgaccagtacaacttgcttagataaagtggcccaaatatattgaaagagaatagtctgcaaggggccaagagggagatgcggatgaaatggatgatttaatgggtcatctctcctgtagttaatttctctagatctcttgtgctatattgattttgtaaatagctattgtcacatctgccccttctgcctgtgggaactagtgggtcttaaaaaattgaattgggtgagagtgtagattaatcaataccaagatttattgactcgggacatttatattaactgttgtgaagtcaagaataatttgaaccttttcaatacttcattaagtggcatagtgtattatctatggtgtattttgaaagtatccttcctggatttggtacagctctcacctcgacttcctaaaacggctccctttatttgtcaagctattaggatttatattataataggaatcacatcaaggtacttttcaaaggctaagtaaaaatcataagaagaaactaggccgggcgcggtggctcacgcctgtaatcccagcactttgggaggccgaggcgggtggatcatgaggtcaggagatcgagaccatcctggctaacaaggtgaaaccccgtctctactaaaaatacaaaaaattagccgggcgcggtggcgggcgcctgtagtcccagctactcgggaggctgaggcaggagaatggcgtgaacccgggaagcggagcttgcagtgagccgagattgcgccactgcagtccgcagtccggcctgggcgacagagcgagactccgtctcaaaaaaaaaaaaaaaaaaaaaaaaaaaaaaaaaaaaaaaaaaaaaaaaaaaaagaagaaactatagtttctgcttgctcataacttctttcagattcctccttttgaaacacatttttttttttcaactggggttaggttttcagtgagatcaaattcaggcatgggaactagagatacgcatatcttaaaattttgttctttgtggaatatttgcctattgcactttaaaaagtcaacaactactttgtttaattaaataattaatgcctctcctttttacaagaaggagttacatcatctttttccaaagggcataaattagaacacttcagacacaacctgttcttaacagggatgtttttcatatctattaagaaggaaataattttgagttgtatagtcatggtgagaaagatatatcaataattattaacttatcctatctcttttggtgctcttataaaaaattgcataaatctataagaatttggttttgttttaaggatatggttcatggctatcagctagatccaagctcactgttttccctaggaacagtacacatgactttggacttggtaagcagcttttaagaccctctaaaatgatgaaaagatgctatattcacatgaaggattgtggtagtgggggatactgttgagggacacgttttggttgtttcttcaagagcagagtaccacaatataaggtgtggagagccaggttgcttaggcatggcttgagtccataggtattgcatgagaaaagttagattggttctaatgatttgcaccaagtgagtcctctttgttgataaagaagtaagatcctattgtcaatctgccaggcctcctgtcttcctctttgcccttcacccacctcatttagggaatccttgagtcgggaaggtcattcctgctgcaggctgccagctgcctacctgcccttcttccagcctggcccggtttgttgctttgttttcactgctcatcatctgtgacttcttggcaaagtcttgcagggcgtgagcatccactctgcatggcccgtcatgaagcactcctctaacctctgatgtaggtaagcacttgccaagcctagctcttaagtacttggcaaatgatagctatgcctcatttatttccttttaaagatgggctaagcaagggcaaaaagagtgattaatgattgtgaagaagagaactttttattgagaacctatgacatgctaactcctggattctatcaggtatagctgctgtttcattaaattatcataaagatgacacaaagtagctattattatccccactttagttatgataagactgaggcacatacaggttgattaaattactcatacagttagtcaatgtcagaacctcaacttgaactcagccctgacttccaaacccattgcagtgctccactcaggtctttcctattcggcccatgataaggtgctatctggctggagaatctgctgtgtgttctgtcctctgagtgcctagggaggcttgctcttccatgcatccactgtgaacttaccttctcaaggctcctgattaagggcatacgattctgaaatcatctagggcttctcttatcctgtgttgtcctaagctgccctcatgattttcctggaggataaaatgctcatcagataaaatgcttattgtttttgagaacctcccttctcaaattcttgtgaagatttcctctatggagccctcatgtggcccactcaagccagggctctcaggagcctcttctcccacaacactttattctttctgaaatacaaggactatgttgacttcaccaaagggatagtcaggtcgcacctggatatcataacttgtagccctggggccttgtcaccagtcatactgcctgccagtcaccatctttagcatgtgtatgtacttgagtggataagataggcttttatttcttttatgatttgcctcaggacaaatcaaagagagcttcactaataacttgtaatgttactcggaaaagagaccagggcttctagcccatgtaaagaagtagaactctggccttgggataggtaaggtaggaggctacagtgggagagagtttaagcagagtgacatcagccattttactgtatgcatagctgggaggcagatcaaggacttcaaacttcaagagtaatggaacttgctgtccaaagcacctgctgaacaacagtttcaaaaacaaggcgtgcctattgcagggttcctaggtgctaaaacttccacttattttataatgaaaaagaaaaattttaagatgaatatatttttacctatttttatatgtggattgacactggcattttcaaataatctgatgtcagatgtatacatgtgtcagatggatacatgtgtcatacgtatcctgaaaggagggcatgtttgatgtcagtactttcatatgttcattggccttcagtgaactggcactcgtcacgttttagttgtgcctaggtaaatggatttatgtgttaggtgatctaattttcatgaaacaacatccacaaaatagacaggtgtcttatacaaactcccaaagaaactgtgggtggaggagaaaccagcactgtatgagagcaacaatgaagtggccgagctgttacttctcctgatttgagttctttgtccagccacattccacggtgaaaacactaaaggtacgttcagaaccgatacaaactcatccaccacaaatatcaagaagaccatttgaaatataaatttgttttcactattgttaatgattaacctttccctaagttccactgtacctggaaatgttgcctagtaatgcaatggaaccaacaggattagcaagaaattaaaaaaaattaatctacatctcattctttttacattttatattttgatgtaggttttatagttaatgtaatgttgcaatagatcatgtacatgatttataaatttatatatatatgttatttgagcaggctctgtatattttttttggaataggtcatatatatatataatatacacaaacaatttttaactgatgtggatgtgcattagttggggaagaccaattgctttaataaatgacaccaagatctactggtttaacaaaacaaaggtttatttgttgctcacatcttgacccagtacaggtcagctgagcagagtaaggctttactccatgcagacattcagatcctagattctttcatctactgtctctgtcatgcctccagctgacaaatgaaaaaacagaatgtggaagataaggttttgcaggccagatctggaagtagctatatcacttctgctcatattctattggctagaactcagtcatgagctcattctcaactgcagggaaagctgggacatgttgaccggctatgagtccagtaggtaaagaaaaactgtttggagaacaatttgccagtcttgatcagagtggaagatgaaaaaaatgtggagactaatttgctcatatgaggttgaaaactcaaggatagaatattgtcgttagaatttgatgtactgaagtttgttcataaatctaacaaatgtttactgagtatctattatatgccaggcactcttcttggctctggagatgtagcagtgaacaaaacagatacaaatttctaccaagaatcttatgtttgagagggtaccccgaatgaaagaggagcaaccaagagtggagaaaagcgtaaaatataatgttcgggaaagttgctttgatttgaaccaagtggcttaaaactatgaactcagacagatctggctttatatactggttttgatagtcacctaattgctgtgtgatcttttagccagttatctaacctctcaagcctcagtttcttcctctgtaaatggggataatgatagtgcttatcacataaggatgttttgagaattaagtaaagagattaaacataaagtacttagtacagtaccctaacacagactcagctctcagtaaaagctagctattataataccaccaataaatagtaacaattattaagaaagatgattccatttcccatgcaggttacctgggctaatggtgtgtccaactgaggtagctctgagagagctttctgtctctgtctcttttggccgcccagatggttatcaggtcattattgtgcttgatatttaattttttaattaaagtgcacatttaataaaaaatttgtgtttaaaattagtgcccatctgctgaaaatattagaacttatagaaaaacataaaagaagtaatttcccataattccactattcagacacaatgacttttagcatgttggctgtattagtttgctttcatgctgctgataaagacatatccataagactgggaagaaaaagagtcttatggctggggaggcctcacaattacggtggaaggcaaagaggagcaagtcacatcttacatggatggtggcaggcaaagagagagagcttgtgcagggaaactcccattcttaaaactaatagatcttgtgagacttattcactatcatgagaacagcatggaaaagacccacctccatgattcaattacctcccactgggttcctcccataacaggtgggaattgtgagagttacaattcaatatgagatctgggcgtggacacagccaagccatatcattggtgtatttccttactgtctttaatctgcataggctcaagagtgagctcctcagcgtggcaccagctcttcagggatgacaatcaatgtcgtcttttgccccttcagaggcctttagtgaagaggttctctgtagcaataagggcagctctataatcaatccaatagactcattgcccactctctgattctcattcctgatgctctctgattatacaatttcagctactttattttaaatgtgctggaaacttctgttctctgaatactaactagggtttttctgctggttctgtgcttctgggcaattggtggaaccaggtgcactcataaaaatgtgcatctctcaaaaaacagaggtatagttttctggctttttcttgcttagtctgtggttgtctaaaacttgcactgggctgtgggactaggtatgaaaggagaaaaataacaccaccaagaaaacctgcattgtcccttggaagttactaatttccatgagctaaattaaaaaatcaatcaatcaattaatcaatcttcatcttttgaggaatgaagcagcccaatacttaacagtggtctgatagtgaccttattctcatcctccagtaatactgattatatgcttacaattcacaaccaaccagcatttatttgcatgtcacctactctgctgaccctgtgtgtgaggtctttctcatgtatgtgccattatctcctaagacaaacagagaccacaggatagaggattttgttcccttggaatcaaacctgcctttgggaaggactttttgggagagagattttaagaaaagttttggagaaagaaagaaaagaataagctggcaactgtgccttgggagctccttggcatttttctgaatctgattctgatttcatttagatttcccctatctgagctgaagtttacttttgcttctcaaaggcttgcttccagggtctggataatgcaaattgataatgtaaacaaagctgtgggagaaagatgggtacttattgtaatactttaaagacaaatatttccttcatttctatcactaactaggttttcaacaaaagtctgggggatgcctttaaaaggcctggtaattgcttattgcttacaaacaattcatatgctaattgaaagctgctcctatctattcattgaagcccttacttcaaaaattttactaatgctttggcagttttagcaacgggaaagtaagaaaactaccgtttaaaatgccattatttagtctttttactaaattaggctggccttccttatcccctatcccattaagcttgcttgaagattttataattgaacatgcaaagtgaaacatgttttacacagagaaaaattcaagagcatttaaaaacaatgtagaaagtaactgcagttactgaggtatggagcgtggaaataaattttacttgcaggcgcaacaccagattgtggccagggttgtctggggttaaacgtgggtgccctggtgggattttatttctatcatgtacatgttttataaaatgggatgtaaaaaattggagatggccgggcacagcggcttacgcctgtaatcccagcactttgggaggccgaggtgggagttcgagaacagcctggccaacatggtgaaaccccgtctctactaaaaatacaaaaaaaattagccaggcactgtggcgagcaccagtaattccagctactcaagaggctgaggaaggagaatcacttgaatccaggaggtggaggttgcagtgagctgagatcacaccattgcactccagcctgggtgacaagagcaaagatccatctcaaagaacaacaacaacaaaaactggagatgtaaaaattccatgggtgtggccacatgctatggatttagacaatattaaactgttatgaattcttaagtctgtaagaatggatttatgaggttttaagggctcctaagaaagacttacaatatggtcatgagaggtcacatcctgaccactagaactcctagtttagctgagaggcagggttgccgagtgaacaccatttgtctgtgttctacaaattatttcttacctagggttactcactggtcttctgggctggaccagctccacagatgaatgggaatactcactgaactaggaatcagagaatcatagctccagttttgtttctgtaggttcttgggtttctggattaatcgcttaatatgggcatctaaatttatctacctgtgaaatgaaattgctaaggtttactctatgaacctcagaaggattttaagcatcagtcttcatctccattttataaatgagaaaaataaggctcagagagattaaatcatatatccaatgcaagtggtggaaataccagatgcagtagtgctttgccaataaaggtttttgcaaaaaaaaaaaaagatgctattactatatatgtgaagacagccttcagaattccaggtatcctagacttctttgcatgtggtcctatttcctacttttggggatttgtttcttcccaagtgcctcgtgtccaattgctgttcccatctttttccctcatcccatgctcttacctaccttctcttggatgtgctgctttggaaagtttttggtgtttctaatcatgttaatgaacttattctgtgtgttccttcagtatgtatgctcctggcctcctctttgtttttctgacacttgtttaaatggaatagtgtattaaccaccctaggtgatgtgttttaacagttacttattggaaagactgctttgatccaaggtctaagacagagctgtttctgtttgggaagtcaaggttacattgagtatagtcagtttataagccggtgtagcttctggtagagaagagggtctcactttgctgcagggcttaattaaatgttattaatgatgtaatgagactgggtcaaagaagaagaatgtgtaagcaaaagccaaagacactgtggaaaaagtgaaactcaataatcccaagtggcaaattttaagatcagctggagagggattctatatactcattagcctggttaaaaaaaaaaaaaaaaaaaagattaaccttatttgtctgctcaagttaaatatattaccaagaatggcaaattagggtatttgaggttcgtctttttccctggtcactgctcatttatcaccaatccagccaatgccacttactgaagatctgtcatagtcattccctcctttccagccacaatgccaaggctgagatcatgccactatcctatctccccttgtctcctcacacatttccttgtccccagtccatgcttactccaatcattccaacgtagtgatctggaacccaaacccagctttctggcctcaactcttgaaatccacccaatgttgcccatgcaccagccacacagaatttcccaattttactgagacactttttttttttttttgagtgctgcatactgtttcctcttgagatgtcctttggcctctgtttggtagatgcctcttcatccttccagatattgctcaaatattagttacttctttaggatactttccttgaaatagttgaagaattctttaaacttttacttcatttgtgatagcacttatataaggttgtatcattatttgttttatttgtctttactcatctctagactctaaatctttcctagtacacatcataatgcctactaaaaagccagtgtctcttgactgaatgaatacatgaacatgtgaatgaatggtgaacaatgtcaattttataccactctaatactttgagcaatgccaattatattgttattgccatactaaatttaaagtctgtgatctttacatataagaagaggaaggtaatgggaagggtgaaaatcactggtctaacttgtttaagtatggatgtctaagattgaacttcactgtaagctttggaaacaatgcttacaagcctgacaataatggtcttgatggatgaagctgtttctacattgtgtggtaagggcattagtcaatgaaagaattaattcatcaaactacagagtacctgtgtgatactagtgtgaatacaaaaaagtagattaacctgattttccaagagcttatatgtatctgggaagcaatatttaccaaaatgatgaatacttgtgatatgggtaggaggcagggaaatactgggtagaagaggacagttccccagccaaggccccactctcaaacctggaaactgccgccctaaatgagaacagttatccccgttttccttcccaaatgctacctttttggcctgccctgcctcctatcctgtgcccctataaaccccagacctcagctggcaaagaggcaagtggctgaacgtagagaggagaagaagcaactgggtgtcagatacttcagatagacgtggcttagcttcagatggcacaacttcggagaggagctcagcagtctctggctgggcttccaggaaagattactttcttcctgctccatcccccttccacctccccttctgctgagagccacttccactgcttaataaaatcctctgttttcatcacctttgagaccgtttgtgtgacctgattcttcctggacactggacaagaattcaggatgccctggatgtgggaacccaaaaaggctgtcacactgactcttcactgagctgtttaacacttaagctgtccatggacagcaaagctaaaagagcattagttgtaacacacccctagattgctgtggggccagagcccaaaagtgctcaccctggccccgacacccactcgcctgtgtgctccatcccatgtggggttgaatccagagggtttgagcaagtggtgtttgtccctgctgtagcgaagtggcgagacgggccaagagccagtgcactccagttcctggccatgaaaggatcaagggaactattctgtctcatttgtatagtgataagtatgcagtaggtattgttctaagccataatttatgttaacactttttatcttcattgaaaccatagaagacaggcactagtattatccccattttacagaacacagaggcacagtgagtgacttgtctacaagtcatgggtaccaatgactagacattctggcttcaaagtctatcctcttaatattgtacacacaatgacagaattacagtctacagaattgcagaacagtatgagagagtttgtcttagaaaaaagcatatttattttctttctttttttttaaaacaaggatatccacattttattgttttccttttatctgattctgaaaaaaaaatttttaccagaactatgtattttttcctgtggatataatcatcaggctaatccctacgatgactaaaagttgtggtggttgcatggtcaccaacttctctcttttttcttttcttttctttttttttttaattttattattattatactttaagttttagggtacatgcttgtttgtttgtctgatggagacttgctctgttgcccaggctggagtgcagttcactgcagcctctgcctcctgggttcaagcaattctcctgcctcagcctcctgagtagctgggatcacaggcacccaccaccatgcctggctaatttttttgtatttttagtagagatagggtttcaccatgttggccaggctggtctcccactcctgacctcaagtgatccacctaccttggtttcccaaagtgctaggattacagacataagccactgcacctggctgaaaagcatattttctgagttagaacttcctggatttaatttctgactccatcacttgcaacatattggtgctgtgcatgttattagaatgatttgaggtcatctaaatattaaggataagctaaggtatgttgaaaacatcatgcagagttacacatagtagggttcaaatattcatttctaacttttctttcattaaagagttcctcttcctcttgaataaaattaagtaaaataagtatgctataaaaaataaaaggcaatgtatcataacacggtagacattagaagaagacagttgtcactagtagggcaagaaacgtaggtagaataatgaagctgaggtagaataatgaagttctgggttaaagtaccaaaggctgtcaaatatccatggcatcaccatggctctgggcttactgaaaaggaagtatctaaaattggtatgcaggctcaaggctcagataaccttgtcctgttcaaacctttaacagttgaagtatctcaaatatattaaacattggaggtcgagaatgccaagtcaaaagcaaaagggagccttttacagtggatatgtgtgtttctctgaagtctaaagtcagaggggacagtggttgtaggtaggttgggaacaagaaagatgaggtgggaagatgtcgtttagagtgtggcaacctcaggcagttagcctcaaagcatttaccaaagaggaagaacaaacactatagcagtagcccaaggaaactcttctttctggatcctctttttgagctgctgagctgatattccacctgtgtggagatagcttagtgcaaaacagctgggttttgaatatgtaaacactcaccggaaatctgtaaatcaggggtaaagccatgtggttgtgtatcttttctatggtacctgcaaactacagctgttcatggagacagtgcttgtattatgtggctgtgggtgtctcctggatggaacatagatagatagtgcctattccttcctcaatgtggtgatccaacagcaaaggaaggactgctggatgtgtaggagtgggaggaggagaaagtggtgtgatggaaatgcaaggcagaaagggaatggctggtgccatctgcaagggagatggagccctcctgaattcctggcagagctattgagatgaaattgataaggaaagtgagaactcatcacccacatatactgtattatctctgagagagaaaaaaagacctgtctgtaatgagcttttagcttgcatctgaaggagtctgctaacttgagctaccagaataatatttgccatattctttttaaaaaatattggtttttattttgtgctttaattcagtgttaagtgagttgttgacttttttggtttgtttaaaaaagaagttagacagttggaatcccatgtaggcataaaagtggggttctaaaaactaggtccgtcctgggtcctaacacttcccacatatagatacgtgtttagtgacagtgggcattagaacagctaattaataactaataccgtaaatattatatattaggatctaggattctctggtcatgtaccatgttagagaaacaacttctgaagtgctataggttgagctagaagtgtttatgtgcctaagtgtgctttaggtactccaagcaaatctttagtataagttttatggttgtttattacttaaaataggaaagcttcactaatagagtggttgttataagtaagggttagagagagcatattaagttatacctgggagtttatagttctttaaatcttgtcaaactgtattattcttttaaatatgtcatatgacggtttataattattgtgaatactttaaaaagctggtggtgaatacgttacaggtggatcacacctgtaatcccagcactttgggaggctgaggcaggtggatcacttgaggtcgagtttgagaccagtctggccaacatggtgaaaccccatctctactaaaataccaaaattagccaggtgtggtatccttcgcctataatcccagctactggagaggctgaggcaggagaattgcttgtacctgggagccggaggtagcagtgagctgagattgcgccactgtactgcagcctggggacagagtgagactccatctccaaaaaaaaaaaaaaaaaaaaaaaaagccatgctgcttaaaagatgtaattttcagaaaaattgtgctacaactaggatgtgatatttaattatttgagacatgttctataatcacaatcaccactgattagtagtcaaccatgttgaagttatagtacctgtgaggaaatagccttaaacacagaatcacataaatatcagagccatactgggaaatacctttattaattagaaaatgtttgccattctggcttctaaagaaatccaactattcttgagttgcaactgtaacatacccttaagtaaaaatcagttagttcatacttcatggtagcaaggactccaaccttttgatagacttacttttcctaaattccctgcaattaagcctctacttagcttaaccaccttcagtgattgggagctcactctttcgctgttaaagtgtttctatttattagaaagtctgtctttatagtaggaaaaactttgcctctttgcaaattaaccgtagggatgccatttggaacaacatggcacatatttatttcctctttcttccaataaactaaattttaaatattttgagagagccatcgtctcacctttcaatatttatagtcccagattctcagttgtttggcaattccatgactgtaagctttttaatcatcctattttggatactttctagtttgtcagtgttctgattaagacatttcaggacatgattcatccactcattacatacttagtaagctcctattatgtgccaggaactgaggatacaatggtgaacaagagagacaatccctccatgctctaagggataggcaataaacaagtatatatatgtattttgttttcaggtaaatgttaagtgctgtgaagaaaaatacaatgaatgtatagaaagtgttggcaatggaagaggtctattttagataaggtcattagggaagatctttccaagtaagtggcattttatctgaaatctgagtgcaatgcagtgcacctgcagtgatctcaaaaaggaggttcaaagaaggaaaacagcaattaccaaggctgtgaggtggggatgatgtgacaatttataataaattaaggtccccagcttttccccttctcatgactcccaaggaaccctaaaaaggataaatctacatggttcagtgttagtgaaaattctttttttaaaaatttttgctggttcaacttcttcctccttgatacacacacacacacacatacacacacacacacactcattctcctaaagataatatcatctctgctagatccattctttgagatttgtgatacagcactgaaagactgagaagaaagagagaattaaagtagcaggactaaaaatgggcatgtttagccagggaggcatcattgaaagttgcaaactcaaagttctacaggaactagggctaacatatatgagtgatgcaggatgggtataaagcaatgaaggatcatggttcccactgtggcataccccatctaaagaggtcagcttctactcagctagagcaaattgttggaatgcataatgcaaacccactgttgccacatgtcccaatttttcaagaatagtaacagatctggtttttacattagatttttcaattttaaaaacactgccacagggactcccactcccaaaaaattggatagacatattggtccctgttccatccttaagtacaattaaaacccaatgacattatatataagaagactctgaaacatgagagggaaaagggaaaccagttaggaaccttgggactcgtgggaatacatggtagtaagtttcttgagttttcttttgcctcctgtattccatatctggagctaaagaagctgaaaagctggaaacatcaatctacacaggcaaaaaagcccaagaaaagcctgttttctctagccccaaaactggaaaggggaagcctacaggacagaaaaccctattccagctgaatagcccagaaatatttgacaattatataattaacaggggtaggtaaagggagataaatttcatttcactgcaactggtaaaatgatgacacgagtggattgtgataagttatgtatatataaggtaataaccagataaaccattaagaaagctacacaaaaagatatatactttgtatgtaaaaacattatggacaaatcaaaacggaattctaaaaattattcaagtaatcaataggacagcaggaaaaagaaaacagaaataaagaacagagaaaataaaagaaatagtagacttaagccccaacataacaataattacattaaatgtaaatggcttaataattccaattaaagagattgggagaaaggattaaaaacatgacccaactctgtgttatctatgagaaatacactttcgatataattatgtagacaaaatgaaaatgataggaaaatatatattatgccaacattaattgaaagaaaataggagtgatgatattaatatcacatagactttagagcaaagactgttgccagagacaaacagggacattttaaatgataaaatggtcagtgtaccaagaacactgcaatcctaaatgtacatgtacaaaatacagagttgcaaaatgtgtgaagcacaaatagactaaaaagagaaatagacaaattcgcagttatggttggaggcttcacagtcttctcaaaattggtaataggtaattggtaataaattgatataggaaatcagcaaggataaatgtatgagtctgctagggatgccgtaacataatgtcacacacagagtggcttaaacaatgtaaatttatttctcacaagataatgtggaagctgaaagtccaagagagaggtgtcagaagtttggtttattctgctgaggcctctctctttggcttgctttctcaatatgtcctcacctggcctttccttggtgtgcctgcacatccccagtgtctctttataaggtcaccagtcttactggtcaccctgatcacctcatttaaccttttaaaagattttgtctccaaataaagtcacattgggagttagagcttcaacatatgaattgggatggggaaacataatttagtccataacaatataaaataactcaaaaccactaccaactaataggaactaattgacatatatagaatacccaacagcagcagaatacatatttttttgcaggtgtccatagaacatataccaagatagaccacatcctgggccataaaacaaacctcaataaattcaaaagaattgaaatacaaattgtgttcactgaccaaaatggaaccaatctagaaattaataacagattgatagcaggaaactctaaatacttagacactatacaagagacttctaaataacccataagttagaggaagtttcaagaaatcaaataataggccgggaacggtggctcacgcctataatcccagcactttgggaggccgaggtggatggatcacctgaggtcaggagttcgagaccagcctggccaacatggtgaaacctcgtttccactaaaaatacaaaaattagccaggcatggtggtgcacagctatagttccagctactcaggaggctgaggtgagagaatcgcttgaacccgggacgtggatgttgcagagagccaagatcgtgccattgcactccagcctgggcaacagaacaggattctgtctcaaaaaaaaaaaaaaaaaaaatcaaatcattaaaccaaatgaaaatgtaacatattaaaatttgtgaaactcagccaaagcaatgctgagaaagacagttatgtagctaaatacatacattagaaaagaggaaaagtctcaaatcaataatcaaactcacatcttaaaagctaaatacatacattagaaaagaggaaaagtctcaaatcaataatcaaactcacatcttaaaaatctagagatcaaagagcaaagtaagtccaaagaaagcagaagaaaggaaagaataaagagaagagcagcaatcaatgaaactgaaaacagaaaaacaacctagaacatcaatgaaacaaataaatgattccatgaaaagaacaacaaaattgacacaactttagctagactaataaagaagaaaagacagaaattgccaatatcaaaaatgaaataaaggatatcgctatagacattgtagacaatgaaaggcaataaaagaatactgcaaagcaaccctacacacaaaagtttgataacttagaagaaacagatcacattctgaaaaaaaaaaatctaccgcaacttggtaatataaaatagataatatgagtagccatacaactattaaggaaattgaattcataatttaaaaactcccacaaaagaaacttctaggcccagatgattgtactgagaattctaccaaacagcagagttgacactaattgcatataagctcttctagaaaatagaaaaggagaaatctcttccctatttattttatgaagttagtattactctgatacccaaaaccagacaaagatagtacaaaaaccccactacataccaatgtccttcatgaatatgacacacaatctttaaaaaaatattagcaagtacaattcagcaatatgtaaaaagaattatgtaccaggaacaagtaaagtagaagggtgcagggaatgcaaatctggctcagcattcaaaaattgatatatcccacaatattaacaggctaaaaagaaaaatcatgtgattatatcaattgatgcagaaaaagcacttgacaaaattcaacacttctttatgataaaaactctcagaaaaatagtaatagagggaaacattctcaataaggagcattcactgaacacctacagctaacattataattcatgtgaatggctaagtgcttttgcactaagatcataaagaaacccagaataactgctctctcagctcttattcaaatagtgctagaagttctagccagtgaaataaggcaagaaaaggaataaaaggcatataagttggaaaggaagaaataaactgcccctattttcagcagacagagaaatcccaagaaatctaccataaacactcgcagagctaacaggtaagttcagcagtgtcacaggattcaatttaaatatacaaagaacaattgtatttctatgtattagtagtgaaccacatggacatcaaaattaaaatatgatgccatttataatggctcagaaaataaaatacttcagtataaatctaacaaaatgtgcacaacttgtatgctgaaaactgcaatgctaaaagaaataaaatctaaaagaaatagaggaaataaaaacaatctaaataaatggagaagctaacatatcatgacttggaagactcaaaatagtagagatttcaattctccctgaattgatatccaggttgtaatgagttgagtttggcccctcaaaagatgtgtttacagcttgcagcgagccgagattgcgccactgcagtccgcagtccggcctgggcgacagagcgagactccgtctcaaaaaaaaaaaaaaaaaaaaagatgtgtttacatcttaatccctggaatctgtgaatgctaccttacttggaaaaagagtctttgcagatgtaattattttaagaatcttgacatgaggagatcatcctggattatctgggtgggcataaatccaatgacaagttttcttacaggatacacacacacaggagtacacagacacaaaggagaaggcaatgtgaagacagagcagagggaaatgcagccacaagccaagaaatgttaccagtgccagaagctggaggaattaagaaaagattcttccctaaaacctccagagggagtgcaaacttgcttgatcctctgatttcagactcctggtctttagaactgtgagagagtaatttctgttttcttaagccatcaagattgtgttaatttcttacagtagtcacagacactaatacacaggttgaacacaatttctttcaaatcttatcaagtttttttttttttttttagatatagacaagattattgcaaaggaaatgctaccagaatagctaacctaatttttaaaacgaagaatgccatgggagaaatgagactactcaattttaaaacttattatatagatacagtaatcaagactgtgtgttactggtaaagggatagacacaccgatgaacagaagatccagatatggccacacgaatatgcccaactgattattgaaaacagtgcaaaagtaattcaatggagaaaaggtagctttttcaacagatgatgctggagcaattgcatatccactggcaaaaaaatgaacctcaacctaagtatcactacttattaaaaaattagctcaaagtggatcacagacataaatgtaaaatgtaaaaactttttgaaaaacataggagttttcttcaagttctagggctaaccaaagagtttcttaggcttgtccccaaaagcataattcctaagggggaaattaataaacttcataaaaattaaaaacttttgctttaagagaatccccaataagaggatgaaaagacaagttatggagtgggagaaaatatttgcaatatccagcaaaggattattatctagaatatataaagcacccttaaaagtcaacagtaaaaaagctgtagtgaaactggatcactcatagattgctggtgatatgtgaaatggtaaaccactctggaagagagtttgacaatttttaaaaactaaacatgcaataactgcatgacccagcaattgcagtcctggtcatttatcccagggaaatgacagtattacaaaatcgtgtacacaaaatcctatacaagaatgtctataggagattatattataatagccccaaactggagataacccagatatccatcaatgagtgaatggttaaacaaaccatggtacatctatactttggaatacttgccagtaatcaaaagggttaaattattgattcattccataaactgggtgaatccccagataattatactgagtgaaaaaagccaattccccaaagggtacatattatatgatttcattctttattctttctttaaatgacaaaaatataaaagagtgaacaggttagtggtttccactgtctaggcctggggagagggaagaatgtgtgcggctgtgaaaggacaacttgaagggttcttgtgatggaaatttcctgtatcttgatggtatcaacatcaatattctgcttgtgatattgtactataggtttcacaagatgttactactgggggagactggataaaggatcctttggaactctctgtattatttcttacaacattcatgtaaatgtacaattaactcaatataaaaaaagtaataaaaaactgtcagccaatcagaacatgtgttcaggccagatattgcctgctggctatactttgcatactttgatatgcataataaagtacagtgaaggcagagataaaggtgaagaaaaaagttcagtatgatgaggtggaagagaggatttgtgggctgatggatagagatactctataatagctgtgggacatgatgaaagtagatagaacagagagaggatttttgttagtgatgcattctgtgtatgtgttagggggacctttcttgtttccaagaacttcagggaaagatattaaccaatgtgttttcttaagcagtgctattgcaaagcgactgagccacatagatctagcattgcaagtgttacaagtcaatgttaggaaacccttgtggttacctggaagagactgaagtagtgtaaataagagatttaagtgagatatggctaaatgtccatatactaacaatagtgcgtgttgcttgccttgcagatcccgctatccattttctcttggcacgtgctcatggctactggcacctattcctagtaaggggaagcttggctctgaacaggcccctattccctctccttgtttccaatttgtacttaggattctaaagtaacagtactcaggatatgtatggagacattatctcctggggcttgtgaggctggatagagggatttgataaggtgctgcaaggtctgtacgatctctctgatctgagatcacactgcaggagtgtgtgtgtggggaggaggggggcaatctccctctgcttattatggtcagtttgggtgttctcatgccatttaagccaccaactgcttattctgggccaagagcaaatgagctcaggtgcatggaattgaaaggtaatgagaatgattaatcaaattccttccagtaaagaatgccacttgccagactctgtcctggataaccctcctacaagtgaatcaggggctgggctcttcccttaggtgtctggtatctgagggtagacatctgtgcttggagtgaactcggaatgactggaggccacttttggcatggtgtctttgctttatcaggcttccctgccaaggtctgctcacaatctcctctggccatgctcatttcgttatggaaaatagggtgaacatgagtaatgggaaatgcagttagctgttggggcgagatgggcccagtgatttcctcctgtaccatggaaagctctacatggtgactacaatggtttcaaaccagtgcagagagatacctggggagtgaatcattctgttgttggcatatttatttatctcattatatctatttatctacctttaatctaattttaggtaaatagaaatgagttgatcttggaagactgggattttaacttttaaaatttcttgataagatgtttacaataggcatatcatctactgtacaactcttaaacaataatataaaactgcataagatacatgaacttaagcgtctttagtttttttgagttctattcctgacttggcaactaatgaattagccactcattggggtgtaactttccttaccagtagaatggggctcataatgtctaccttgagagcagataggatggagagtgatgcctgatgcatagaaggtactcagtaagtgttaatccttgcctttgcccaatttcccacctaggagaatttttgtaccttgaccttataaaattccctgatgaggaatctatcccagtagcagtacctttttcccaactgaaggtattactttggtctacatggagtctacatggtaaaagccaattggtcctgtggcacagagaaaagaggagttgattatctgtaaggagtaatgggttctcatatacagtctatgtaccaggaagtgcttcataaaataaacattggtttattggaaggagacagaattactgggaacccagaggagcaggtgttgaaaacaggtaggaaccaatgggactttggaggactaggcagaaggaggaacctggccagatctctgccactctgaatatatttgagaatcattttctctagatttagaattaggcaagaagtatccaattggttgagcctgtcacgtgtctatgccttggctgcttgagcttgggaaaggaagattcttcccaattatgcttctatagcatactcatactccaagataaggagaggctggaatgttggataaccatccccaacccccaatgacagtcatccactaagctctgcattaattagctgtgtgaccatggataaatcatttcatatttttgaccctcagtttattcatgtgtagcatgagaggtctcaaacacaccagcaattttcaacttttattttttaaacaattgcttactttcataaaatgaagttttatttagatacccaagatgtaaaacatgaaaaatgtagacccactataactgggggagttcttgagggtggaaagagagaaccctgctcagccttcctattctgccccctccccagattcccttgcctttgctactggctttcccagccttggaagctactggggtacgttaaggatcctccaggattccatggagcacaattaggaaacaactggattctgcaatcgctcaggtctctttcaaatataccattcggtgattccataactctaagatttagaatgctgctcgttttatccgtatgtattttttgcaccccactctagactttaagacgttggatcttgattcagcatgtagctaattaagaaatttgattaaactttattttctttcaccttaaaaaaaatgaaaccagggaaatcaaacactgcagaagcctcaacattttctctgtcattctttattagttaatggttgtcccatatgcaaactggccagaaaaatctgctaaagaattgagaggaaatttgattgaagtaaaacaaggactcactcccttctaagaaacaacatactttatatatgtcatgtggtttcacacacacaaataaaaaaaatgaaaggaaataaatcaaaatgctaatgagggatacttttggataatagggctatgggcaattttgaatttttttttaaacttcttcctattttctgaactttaagcaacacacacacacacacacacacacacacacacacacacacacacgcatataaaacttcctaatcataaaaaattatgaaaagtgaacacatttgcaagccaaagtaattaagttaatttaaaaagttattaagtcagcacaaaaaattgaaattaattgtgttaaaaatagtgttctattgactttaaacccaatgagccagcacagttataaatctaagcacccacaattcctgaacttatagagaataacctcttaccccttcttatgatgaatgtgccttatttctccagggacagaaggccagtgattgggaaatattctatgtatgaaatggcagttctactggtcacccatacaggaaaggattcactattttggatgacgtttggcttagtgcagatgtttaaatcagtaatagattcaacttacacatctaagaatcctcttctttcttagtaccacaccctggaccttctcacaaggtttagaaggtaagacactctttattcctccatttactgcagtcttgtcctagtgacacctacaaggaagcacttggtaaatgctacgagatccaaatgtcaagactgaacctttaggactacctgtgacaattgttagaccacagcttaccctttgactcctgtgaaaatcaaggagggtgaggagcaactgaagaaaagtcctctgatttttattccttttttccttctataaggagctctaaggtattagattttttttttttaactggcaaaacaaaagagcaaaaaaagtcccattttcagtatctgactgtctccttaaagagagacgggaggataatagagggatagatagatgcgggcagacagaaacagttacagtagccagacagatctatattcagtttattatatttgattttcagagttaattgagtgttttgccttaaaattatctttttcttcctctttctctctttgctgtaatttaaaaggagatagataaaggcaaagaaaaatcaatttaaaagtttgcttttcaaagttgttccatggtcttaggggtcattaattcaaagctagcaccaggtagtcagaggcagatggctttattgtacccctgtgatgaaggttctttgtgactgtaggtgaagggaagaacaggaaggtggaagagtgtcgcttatagcatcttaccaagggacccagaagtcttatatattgtctcttatgggtcttagtttaacatcagatcttcatgttctgcctagcatgatgatgccttacatttgtttaagaaaacacattatctgcaaggtagatataattattcttactttatggatgaacaaaccaaaggctagaatatgtaagtgacctatgtcacaaagctagcaagtggcagaggaagaacttgaatcctggacttcagattctaagggtggtgccatgttcactgcactccttagctatgttgatcaggttatagtttatattgtttctcttttttcttttttttttgagatggagtctcactctattgcccaggctggagtgcagcggtgccatcttggctcactgcaacctctgcctcccatttcaagtgattgtcctatctcagcctcccaagtagctgggactacaggcatgcaccaccatgcatggctaatttttttgtatgtttagtagagacggggtttcaccatgttggtcaggctagtctcgatctcctgactcaaatgatccaccctcctcggcctcccaaaatgctgggattacaggtgtgagccaccgcacccggcctatacttaatattgtttttgaggttatctgcaatgctcacccccagctcacaagaccaatgtagtactttatgtataacaaatgtcaataaaatgacattttatacttcaagtcatttctaatttaatattgaaggaaataatgatttacttaatttggagaatgtctttcatcctcataaaaaaagtaccaaagtatttgatttttttgggttagcatcatgatttcttttttgagttatgctgggaaccaggttatagggcagaagatggtcttgaatatcaaagaaaagaaacacttatctagaagacgctatgtgaccttggggtgaccttaaataagtgacttaacctcttgaaatcttgtttttctcctttccataaagagcttgataatacctgccctacatcctgaaggggctgtttctagagtcacaaatcataattgtaaagcattgctacatgtgaagtgtgattccttgcaggactagggctcctggctgagacgtggcctaattggcccctctcttgggaatgaagacaatcagtcaatgaatagtgagttcctgggaaattctacaacaggcttctttcttgccatcttccatccgtattcctttccctccctactcccagaacatctctgatccaataaggacttcttaaagagagatatgggaagtgcaggcgagtgactgccttctttcctatggtgataatgcttataatgtagtcttatgtttttgtggctgatataaagtatttggcctggcaagtaaaaacacataggcatgtcatggatgtgccagagctgcattcttggaccacatggtggctctgtggctcgggaagaacaggagttttctctgccttttctacccctgtgccacatcctccctcctcaacaaagtgtaatttactcttaaagcagaactcactctcatacttttcaaataaaaatatcacggatctttaatgagtgcctaatttgtgtcagccccagaccagatactcccatatgtgacctcattgaataattgcgcaggtgggatggatattactattgctatttcacaggtcaaaaacctgtcacttcagttacataatgtgcctgaaatcacctagagagtaagtgattgagccaaaactgaaattcgcgcttctgactccaagtgcgaggctcctttgactacatttaggcttattgagtgtatgcgcagctgcaggaaaatggagcctacagcactgtagtgagccattgtcttagtcatgagtgagaaaccagtttgtaaccaacattgaactactgataaggaaattttgagggaaagaagagaaagttctgttaagaaattagtaaataaaatccattaaaaacgttttaataagcacaagattttttttttcttactaaagaaagtaattcatgttcatatggaacaggggttggtacacagaggtctgtgcaaataaagttttattggaacacagtcatgttcatttgtttccatattttttctggctacttttgctctacgatggtagagttgagtgatggcaataaagactgtggcctgcaaagccttaaatatttactatctaaccctttatagagttagctgaccctgaaatagaacacttggaaaacagaagtacaaaggaagtaaaaaaggattaatctagaaataaaccctactgcattttgctgtgtttacttcttaatttttccttcccaatcattaagtttttggagaatttaactttaatggttgaataatagtctttattattaattattattaatataccatacttcaattcatcattttttatatatattcaacttatttctatttttttctgttataaataatgctgtgatgtatatatgagtacataaatctttgttttgctctttgacgtcaacttctagtagtgagattactggatttagtgatataaaaatgtttaagtttctttttttttttttttgtttgagacggagttgctctgttgcccaggctggagtgcagtgacaccatctcggctcactgcaaactttgcctcctgggttcaagcaattctcttgcctcagcctcccgagtagctgggattacaggcacccaccaccatgcctggctaatttctgtatttttagtacagtcagggtttcactgtgttggccaggctggtcttgaactcctcacctcaggtgatccgtcctcctcagcctcccaaagttctgggattacagacgtgagtcaccatgccaggcctaaggttcttgatatatactgaaacattgccttccagggaagttacagcaattcacccttaacttacctgcagagcgtgaaagccaatgcctgtctcaataagccttcattactgctgaggggtgtgattttatctttgaaatttttatcatttataatgtgaacttattctccttttaaatttattgttatataaaatgtttatgtcatagacctattattttctatcaagtatttaagttttcctcttattattttgatgagcttttaattgattaatagtattgttgcttggtattataaatacatactcatggcaaacacttttctttcaattttgcctcaattttgtttatgatgttctttgaggggcagaaatacttgatttttttctctagttaaaactattgagactctttccttttatgatttcttcagttgcttttttaatattaaaaacttttccaagtcagagattagataaatattcatttgcgttgtgtgatttttaaatttaactttttaatctttatgaaattgatttttgcataaagtactaaacaaaattacttatatttgctttccaaagtataaacttttccagcataagtaattcatcttatccctcactgattttcaaggattcctgtattacacaagcttttgtatatatgaggttctctactatgttcagttaatctttcactgatgcttgtgtcagtattacactgttttagttattgtagctttacagtaaagattaacaccgggtacggcaagtcctcctttattattatttatttttatgcatactattttaaaactgtaagtgcttattgggctataccagtaagtatctagagcagtggtttttaagctcctaatttggcccactacctatttttgtaaataaagttttattggaacacagcgatatttatttctgtgttatctattgtgtcatttgcagtacagtggtgcagttgagtagttgtgttaaagactgtatagaccacaaagcctaatctgctttgctgcctcctgatctagaagatttagactaggaattcaagtagacagaaaaccggtgttacaaggtttagaccttacttcttggcacaccccactcattccaagtgggattttagctgttcgctccaactttttgcatctcgcctttaccttattagtaaggagaaagtcaagatagagcaaagactctctaatctgccattggccttcccattatttatattgccgtattgacaacaagtgtttcttccgagtctaacttctctctacgatcctaagcatttttgtagggggtaccaatatataatgttaaatacttccatgtacatctattgcttgaaagaaaatcatttcattgctggttaaatgagtattttagataatctttttaaaaatgttattatttttaagttccacgatacatgtgcaggatgtgcaggtttgttacataggtaaacatgtgccatggtggtttgctgcacctatcaacccatcactaggtattaagcccagcatgcattagctcttttccctaatgctctccccacctccatcccccgacaggccccagtgagtgttgttaccctccctgtgtccatgtgttctcattcttcagctcccacttaaaagtgaaaacatgtggtgtttggttttctgtttttgcactagtttgccaaggataatgacttccagctttatccatgtccctgcaaaggacatgatctcattcctttttatggctgcatagtattctatggtgcatatgtacccctgttctgattatcttgtcactgttcctctgcatttacacaggagtacagaagttgaccacacatctggattagctgagggctcaagataagaaagtctgaggtgctttgatgggaggagtaggaggtatgagctcatgaaaggcaacaatgtttactaagaaggttaattcttcaagtgtgaaggtgtatctaaaagttccttcatgaccttttttgtggcaggtgtggctatgtgctcatgggctactaaagcgaggcttcaacagactttttaaaaattggataaccatatctctctaaggatagaccatttcccacagagaccactcactcaagcctgtttggttgtttatttttatgacagttttggaactctggcatatctcagtgggacatgctagccttctctttgtgtggtctggaatgaccttttatgcactcagcaaggtgctataaaggattgctgtaactagtcagggctccatgagaggctggcaggaacacctaaaaagttgctaatatgtgcacacatgaacacatacacccaatgaagagaaagaaaacagaaaagcaaaggaattattttaaaagtcatatatattttctcatataatctcagaatgatatagagaaaaatgtattgggtgttggcttctataattctcccataaagaactattttcacaacagccaaaaattaagaaaaatgcttctagtattatttttcaccttctcagaatggaaggatgaggtgtggttcttccagcctcaagatatttcatcccttcaaaccacaaagattgattcaataaggttgtgacaagtcctgtgctaaaggaaaaaaaaatctaggatatgaagtaaccaagagaaaggaaaacgtgactataaacaaggaaaaaaggagaaaccaatgagaatgggaaacagaataaaaatattgcaaagagctaccgatgagaaatgcggtttgataataatctttcaagagaagtttggtcttagaagaaaactggctacatcatgctgacaaatacgtcaagatatgcaacagagatggcctaaccatccatggctccactgtgggaaggtcagacattgttgaatatctgtgctcaatgaaatatgtgttttcctaactctgacactcactgttattgcaatgcatacagactcctcaaagatcgtaagccctaaaagttgataagtgttcagagaacaagctctcactcagtacaggaattctatcctgtgatatttcttgagagaatgaaattgttgaattcttagatcttgaaagcagtttaaatcctcgagtagtggctaagactgggggctacagggccagagggcctagatttgaatttatgctgccctgggtcctggctgattctttggttaaatcaaccctcgaagcctaaataagactgtaaaatgaggatgataatagcatccttttgaaatgtagtgtggatttagtgagatgatataaatcatctaacttagtgctctatacatgtaaaatggtcaataaatgttggctattattgtattttatattatcattattatctcttgtagtctactcattttacaaatgaggatcaatctgcagtgggttgtagcaagaagacccttaaaactagagaaatcaaataaaagtgtttaatgccaggtatctcttagttggttggataaattttgggtactagcttccttttgcaggcccaaagtactcatcacataggataatagatttactgcaagaataactctgatttctaaagtattgtaaagtgggtgaaaggaggggagattaaattagctttatctttcagaatccgaaagctgatgatgagttaggagaaaggaagttctgattctctgagctctagatttttcactaatctaccagaaaagagaaaaccattcttctgtgattatatattgtaaacgggggcaagggccattttatatacaaagaattccaaggaagaggtctagcatgtgaaaatacatgtgattttttttttttactttttttaaaattaaactttttattttgaggtaatcgtatattcataagcagctgtaagaaataatatagcaagatcccaagtacactttatacagtttcctctatagtaacatctggagaaactattgtgtaatgtaacaaccaggttattgacgctgatatcatcaagatacagaccatttccatcaccacaaggatccctcctgttaccctcttatagccatactaacttcccgtaggcctatttatgatatccctattctgttccattgacctgtgtctttttgccagtactctgaagtatttattactgtagctgtacagtaagttttgaaatcatgtagattgattcctcctacttcatttttctttttcaatattgcttcaggtattctagtttcttttaatttccatacacatttttaaataatcctgactatctctcccaaaacaatcttgcttggattttgacggaaattgtgttaaatctgtatatcaatttgagagaattaaatcttcactatgttggggtttcaatccatgaacatagtatatttcttaatttattaagaccttctttgatttttaataaacattccatagttttcagcatacaaattctgtttatatttttatatctaagtgctttaagtttttgagcaatcataagtagtatttttaattttggtggctacttgtccattgttcatatagaggaatacaacagacttttgtacgtttatcttgtgtcctgtgaccttgctgaactcacatattggttctatgtgtgtgtgtgtatgtgtagattacttgggattttctacatagaaattatgttatctgcaaataatgacagttatatttgtttcttccagagccgtatgtatttttttaaatttccttattttactggctagaacttccagcactgtgttgaataaaaacagtgtgagcagacattcttactttgtttatgatcttaagggcaaagcattcagtcaagcaccatggttagctattggttttctgtagctgctctttattaagatgaagaagttcatctctatttttattcttctgagagtgggtgttaaattttgtcagatgctatttatgtgtcaattgatataaccatgtgtttttttcttctttagctgaagaatgtgctagattacattgataggtttttgaatattgaaacaacttgcatccttggagtataccccagttggtcatggtatataattctttgtatatattgttaaattctgtttgccaatattttgttaaggttttttgtgtctatatttataaaggatattgatgtgtagttttcttttttgtaccgtttttgtctcattttggtatcacgataataacttcataaaatgaattgcagtatctcccttttctctattttctggaagttattttatagaattagttaattaatttaaatgtttggtagaatattccagggtaaccatctggacctagagattttattttgggaagtattttaattatagatttaatttccttaatagttatgtagctattcaaatgatctcttccatattcaatgatttggggtagacagtgtttttttgaggaattggtccatttcacttaaattatcaaatttatgtaagtattatcaaatttatgtatgtattcctttattatccttttgatatgttcgggggctgtagtgatatcccttcttttatttctgatattgacaatttgtgtcttctgtctaactttgtcagtcttgcaagatgcttgttgattttgagcttttcaaggaatcatctctttgttttattaattttctatacttatttcatttttactttcattagttgttgcttttgtctttatcttccatttactttggatttattatttttttttaggttttcgagatgtggccttagattataaatttgacttcccccccttttctaatatatgcagttagtgctataaattttcctctcagcactgctttagttatgtcctataaattttgatatgttttatttttcctttagcttaaagcactatttggttttcttgagacttcctttttgacttatatattatttagaaatgtcttatttaatttacaactgtttacttgtttttgttgttgttgttgtttcatttggtctaatgttggttggcacatgcactgcatatgatttcaattattttgattttgttgaggtttgttttgtggtccaggatgtggactatcttggaaaaaaatgtgtattcttttactgttgggtggagtgtttgataaatgccaattattaatagatactgttagttgatggtgttactgggttctatctctttgtgattttctatctagttgtcctatcgattattgagagaagggtgtgaagtctaaaactctaattggatttatctcatttttccgttttcagtttttgcttcacatactttgcagatttgttgtttggtacagttacatttaggtggattgactcttttatcattatatgttaatcctccctgtttttgtgattttttttgtcctgaagtctaatgtatttgatattaatagagccattcctgatttcttttgattatctttgtgtgatttatctttttctatcatcttattttcatcctgtctgtatcactctattagaattgaattctttgtagatagcatatagttgggtcatgtttttaatctattttgctattttctgtcttttacatatttagactctttatatttaatatcatcatttatatgtaagggtgtaagtctactatttcattgttttctatttgttctctgtgtttctcttttctttttctgccttcctgtttgttacttgaattttttttaatttagtattttgatttatctatggtattttgaatgtatttctttgtatagctttttaagtgattgctctaggtattacacacacatgccacacacactcacacaatcatagtctactagtctcattttaactgtccatgtgaagtgtggaaacctttatgtaatcctccctttatgactctttaccctcccctatttataattttaaatattttgcctacatgtagttagaaccatgtcacacagtgttataatttttatttcaatcatcagacagaatttagaaggctcaaaggagaagaaaagtctatttgtccacatttttgcttactgtgttgttcttcctgatgttttgatttctcttttaaaaagtcattttctttgtttagggaaattttgttagccattatttgaaggtaggtggtctggcaataacttctttcagttttctttcatctgaaaatatgttgagttttcctaattcctgaaggacattttcacagataagaattctagattgacagtcattttctttctgcatttaaaacatgttgtgccacttcctctggcctctatggcttttgatgagaaatatgctatcattcaaattatttttccattataggcaagatgtcatttttctctgactgttttcaagatttttttttggtcttcagttttggaagttctgatatgttattgtagtcagctcagattgccatcacacaatatcatagactgaggtggcttgaacaatagaaatttattttctcactgtctgtaggctacaagtctgagatcagggtgccgggtggtcaaattctggttggggctctctttctggcttacagatgagagagttctctctcttcctcttcctataaggctactaatcctatcaaattaagaccctacccttatgacctcatttaatcctaattgcctcctaaaagccctatctccaagtacagttacgttgggagttagggcttcaacatatgaattttaggggtgcacaattcagtccatagcatgtgccatcatgtggatttaaacattttatttaacctgcttgcactttactaatcttcttgagtcatttagtttgatgtctcttaccacagttggggagttttaagttattacttctttaagtacttttcagccatgcctcctttgtcctcttcctcttggacttcattacagaaatgttacaccttttgctatagtccacagaccctgtggctccattcaccttcttctcttttcttgctgctgtttagattgggtaatgtctatcttccaattaattgatttttctccccctctgtgtcctccattctgctgttgtgcccattcactgcgatttttattttggttattgtagtttatcagttattctgtttttttttcccattcttaaaatgtcatttttgttcttatttatattttctttttagttgcagagacttttatttcattgctgagactatactccttgaagcactttttttgtttgtttgtttgtttgtgacagagtctagctctgtcacccaggctggagtgcagtggtgcgattttggctcactgcaacctctacctcccgggttcaagtgattctcctgcctcagcctcccaagtagctggaattacaggcacatgccaccatgccaggctaatttttgtatttttagtagagacagggtttcaccaggttgcccaggctggtcttgaactcctgacctcaagtgatctgcctgccttggcccccgcaaagtgctgggattacaggcatgagccactgcccctggcctgaagtgcttttaaaatgactgttttagggccaggggcagtggcttatgcctgtaatcgcagcactttgggaggctgaggtgggcagatcacctgaggtcaggagttcgagacaagcctggctaacctggtgaaaccctgtctctactaaaaatacaaaattagctgggcatggtggtgcgtccctgtaatcctagctactcgggaggctgaggcaggagaattgcttgaatccgggaggcagaggttgcagtgagccgagattgcaccattgcactccagcctgggtgacaagagcaaaactctgtttcaaaaaaaaaaaaaaaaaaaaaagtatgtaattctaacatttccatcattttactattggcatctattgattgtctctttttattcattttgagatcatctcagttcttgctatgatgtgtttccattgaaacctggacactttggttattattttgagactctgggtcttatttaaactttctgttttacttggctttgtctgacacttctctgtcggggaaaggtggttgggggaaccacctccttactatttcattcaggtaaaagtctaggttctctacttggccaatattgacacatgagggtggggcttgttactgttgggcagagtttggaggtctggcttcctatgaggcctccattgatacctccctatctaagagtgaaagaaatgccttgttactattccccatgtggcctccattgatactgtgatgataatggtggaattgcctcattatgttgggtgctggcaaaagtcctggctctctactaggacttcattgacataaccccgaggggatggggagtggtgatttgtttctgctgaatagaaataaaaatccaggctccccatgtggtctcaattgacaccatggaggtggagggttttgttgttacatggcagagatgaaagtcctggctcctggcttggccttatctgataccactcaggctggcaagttgagaccccattatagcctaacaagtgtgagggtctatgttcctcagttgttcttcactggactgggtagatatgggaccacactctttctgtgatgtttggctggagtatggaaattgctttgtgaaagttttttgtcttcctggttctttgactagagatagcaggccttctatggggctttttgtcacattaccaatttattcaatacttagtctgagatatgcgatacaaaacaaaaacacagaaaacttattgctgtgtcattctttagatctcaaggtcctgaattagtatacattctcctatcatttcttatggttgttttatatatagtataaaaacaaccatatacataataaaaatacacataataaaatatttaaaaaatcttatgtttgttttatatatagtatctagagtttttagttgtacttaatagaaggaatagaaacaagcatgtatactctattctccctgaaacagaagtctgtgcacttgtttcaaaaacaccaaagcatttgataagtgtatgagaaatgatggtcaattacagtataggctcattttggaaatacgaaggttcccagggagctgtccagggtgctggactctccttaaagctctcagactcagtgcatgagaattttccatttctctgtcttctaatttcttcttctgtttaacctttttaaataccagcctctaactactctgctctacccttccatactcaatgtctaactgctgcctggtgaatttgtggttagttggcccttaataactagtgatgcattggctatttttgacagtaatttttatttgctatccattctagctattcgctagtctggctgaatccttgggaaattcacaacactgtcatagtcttcaattgcttgtgtcactgccacctctagccattaagttgctctgttttgtagaatggtagaaaaagtcctccggaaaaatgcaaggcagcagagaggcccctccctcaagatcctaatagtgtcagagggaaactagaattagctatgtaactaggggaaattttctcacatcatttatctatactacatttactattctttgtttttacaatatctattgtaacagaaaataaataattgaccagtctgtgttttgttttctttttctttcagtatttgcagagaaataactgtaaaacattttacttcattctattagaaatattgaaaggggatgatgcagccatggcagaaaaaggcattattcccctttaagagaaatttctctcagacatagaaaaaatacagcagtctcctattatgagttgaccttggagccaagaagtagtagttattccctccatccattccattactaatacagcaggcaaaagtcagaaagattagtttcaaaatttctataaactcgaagtaaagtttcagctgtcttcctttatctgacagtgtttttactggtggtacttttaagacttaaaccaaccataggcaactattttctcttcttgagctttatgggcatcttttatagaaactttacctagctgtcagtctattaactcccaagtatttagtttgattcatcggattgcggatatttctaaaaggtaccgcaaaaatacatgggcctgagaatcctcaagggggttggattccagtgagctagtgaaggatcttcaaggtgtttattgagcacttattccctggactgtgcatgatgctgtataggcattattaagttaaacctgacaattctctaagttatggacttagtatgtaattgatggtctctgtcttcaaagtggaaatacactctccactgtgtttatgaaaatcactaaatgactgcctggctgggtgtatgcagtcggtttctctctgattaccagtgatagattatcatgattaatcctcaccatttcccattctcctctgcaccctcccccaatttttatgatgaaaaccatcttcatctgtttgtgctgctataataacatacctgagactggggaatttataaacaagggaaatttatttctcacagttctggaggctgagaagtccaatatcaaagtgctggcaggttcagcatctggtgaggaccctgttccctgcttccaagatggtgccttcttgctaatcctctggaggtgacaaatgctctgtcctcacacggtaaaaggtggaaaagcaaaaaggtctaagttagttccctccagtcattttataaagcactagtggggtcccaaaatgccactttttattttttttgggatggcgtctttctctgttgcccaggctggagtgcaatagcgtgatcttggctcactgcagccaccgcctcctgggttcaagtgattctcctgcctcagcctcctgagtagctggaattacaggcacccgccaccatgcctgactaatttttgtatttttagtagagacatggttttgccatattggccaggctgatcttgaactcctgacctcaggtgatctgccctcctgagcctcccaaagtgctgggattacaggcgtgagccaccacgtctggcccaaaggccactttttaataccatcacaatgaggattagatttcaacagtggaaggtggaaaagcaaaaaggcctaagttagttctctccagaccttttataaggcactagttgggtcccaaaaggccactttttaataccaccacaatgagtattaaattttaacataaattttggaagggacataaacattcaattcataaatcaaaggcagatattatgctcctttgcttgaacaaatagccagtctctggcaatggaccattttctaacttgtataaagctggctggcccacataaggattcaatctataactcatacttaacttcttgatctaaccagctaaactattcattatagttaaaaaggcaatacacaatagaggaacatactcactagtttctaagttttaataatttttaatgccttgactagatcaaactagtaagatacagagcctgcattcgattccaggtttgctgaattccaatgttgtacagctttaaaaagggaattattgcatgctttaaaatggtgtttctgtctcactgcatgtggtgagtgatgaatcactgaatggatgattaactgttctgaatggtgcggtttattacacattgtacattgtgtgctatgcaccactaacctgcataggatctatgtgtgttcttctgaatattgaaaaaatgaggaaaatggtactttctatctgcccttgaggatgttatgtgtgttaataaactagcatctttgaagaaaagatccacatgcaacgaccttttcacttgatagcaagaagtctgaattagtgaaaagtcagaataagtgattacttggaattttaaaaaatcaccttcaagaacattcagtagtgaaaacaaagatttactaagtggattgatgggtcttttattgaatatataataattcttaggaaattcctatttatatgaattataagtgagtaggtgctgcccaagtgcttaaaagccgtttgttcttttaagaatctttaccattccttctaagactttggagcgtttggtgatgtccttaacaagccattgtatatagcagaggagtaaagtggaatcacacataaatggtcacatatttcaaatatgaagatgtaaacagtttagggtctactctgagcacctacttagtgtagtagagctgagcagttgaagtcatttgttctgaaatcacataggtctaatcctgaaatcccctcttaaccatgtgactttggacaggttacctagtatctctaacatcacctgtgctcatttctaaaatggagagaatactgattagacatatcttatacgatttgggggctactaaataagataatgcatgaaaagtactatgaatcatatttacaacataataaagatcagctgcttctattattaatattaacactattaaggagtaattttacaaatgatgctctctccctgtgagaggttatgggtaacaactgagtctatatttgttggcatcataagaagacaactccatatatagtattctgcccccggatttctgcttcttgtttgaggtgggagcaaagaaatgacaggttcaatccaaaatatctttgagttgttcagctaaccgtgggattgggtgaaggatttaggaaggctatgttttggatctgaaataaggggatttcaagactcctgtatttactacagaatattccaaacttttgcagctaccttgaaactatgaatcagccaataggaagaaggggccccaggtaactgctgtagaaacactgccggctttcgccctgacttcttttctgctcactgcagtagcaacttagcttcaaaatgtcctctttagtcatgcattctgatcaaagtagttatttaaagattgtggctaatagtagagtagatacccctggtatttcccagagcagagctcgcattctgggaatcttaggtccatgtgacttcctgagtcagtgattcacactgagaaaagagataggtttggcatgacacaatctgcagattcaaataaatcccctgggagaggatgaggctgctgagagtcctctttgctggctgaagctcccagtgtatgcacaaaacaccctgtcccgggccccagatgtgtgcaggtttctaattgccggtgctgcactaagatttgaagggtgagagagttgcaaaatcacgaacaccgagggcggtgttaggaaggcagcttcctgcacactgttgtaggtgttagtgagattatcaattgctccgggagagacacaggactggagggcttgaggaatgtggtggtccctctcttcgttgtttctgccccctgaggttgtgctttctcagggatatgcactctgcacttccattcctgcagtgaaattaactcgagcttggcaggtaagtctttcggctcacctttaaaaagaaaagatatgtgagctgcggtgggggtgggctgttccccatttgccttacattggatgtattttattggtgcaaagtggtatttggaagcttaaatgtggggcagaggtttgaagtagccaaatgaactctgtggccctgagagaagagaaaggataaccaaaagaaagggaaggggactcaggcatttttctcctaataaatctctaatttttcttggaaattttgcctccaggccgatgcctggccccagaacagggtctttggcatgagttatagctgtgatgttccctattttcctttttttttttttttttaagttgtcgctgcatgggagcaggcagacagaaacagggttgcatgttgtcaatacaggctgcagaagtcaataagcagccagacagggaatgaaattggaggaggcagctatagatttcttaggttatttcttgtgagtttttcagaacttgtgtgattcaggcttgtcagatactattttgagctgggctgagacaaacacattcccctagtgcaccagatattgcctgcagcctcccaatttctggaggcacctgggtcggctttcttgggggcaagggaatgtccaaggaaaggtcaggaatgagggaattggaaactatgatgggaaaaacaactgttttactgctctagaatctaacagaaatcataatgtcaccctggagataattattatgctgttagtgatcggcttgagaccagggactgtgcctcattcaattcactgcttggatcagagtgaatactcaataaatgtacaatgattaaatgttagtatcaaaatacatacttttgggataagctcggattgatattctgggttctgcttagaatgataagatggagtaataagggagagtaatgttgattggtagataattatgaagaaatgagttctgttaaatagtagattaatatctgcaagtggaattattagacaaggacacacaaacacagggtctctctgcctgcctatcgtctgtctactttcatctctgtcttgtgtttcacttgattccagaagaatttcaggcagcttatgggacaagtttaatgaaaattaacatcattagggataaaaatgacaaaatatataggcttcatccagcaattgatcttctgtggttctacagtgacatggactacagataactgaaatgtaagggttactgtaacttcatttaagcatttattttaacctcttcttccactaatctcatgcttgatgctacaaacctagagtaaagtagatgaatgttctggccctgctgtgggtcccagtgaggtaaaactagcaaagggcagataacagtcatgcaggggattgagtcatacatggagggttgaatgttttgccctttggaggtgataaagcagataattgggtggctcttctccattccataggctgggctgctctgtcatagcttcacagtgctttgcttactttttctttcccctatttgaaactgaatcaggaagatcatatttcccttccgatcctgcttaataaaatattctattattttctcagctgcaaaagtacactattatcactgatcattccctcctcatctcagagtgtttgtcactggccacagtttatatacaagctatacaggctgcctggaacttgaattggctttagagtggatgctggggaaggggcgggggggttccgggtatctgatgaattcctgcaactgcagggctgggagcctggcggggagccaaggggattgtggacagatgctatgcttgctgggtcgacctggctcagctaatattcccagacttggagctgggggacacattcatttcattcaacccatacaaaaatatggacttaatatcaactatgtgtacggcatggaattcttggcatactcagggtgtcaaacccaggagtccctgttccccaagtagctgactctgctacccacatagcaggtgctgttacattgtctagtttatttctcttggatgggaaaataattttatcctattcacaaatgaggaaaccgagactcacatattatgcaccatgcctaacattgcaggtagtgaatggatgaatcatgagggaaactgtttacttcaactgtactgcacatctgtaagaaaagacattcaggaaagacttttacaagacagtgcatgctaagggctaggaagtttggtgagagatggctcccatggagaagtagaaattaagatgggctttgaagcatgagcagatgacaaaaaagcccaatccaaactggcttaaacagcaagggggtggttattggctcatgtgattgagaagatcaatgtgaccaaggtctggatatttctgtcttgtgtctcctaccgagttggctttatcctcaattcagctacctaaagtcctctggaccctacccccccggaagctgaaggatgactgcgggagtttcagtcccctacatagttcctggggccactttctctcattagccacaactgtggctgggggtagacaggagacagtttattctgtaccctctactaaacagcataggtaagactaatagagaataaattttgcaaaaggaaaatctgggtagaagaaggggaacgaatggttggtagcccactaatgtcccatagcagaggatttagagaggcaaggggagcagaaatcctcacagcacaagcactggtagcagtggagggtgggtaggcctgagttagaagttaagatgccagtcttctgatgttcctgggaatagatgttttggccagctatgtcttattaccagtgcccactgatcccaaaactaccttgctgcatgctgatagcgtcctcctagacctcagaggttggaggtgggggtgagagggtcttagtttactaaggtagaaatcagtgaactggtagggtcagatcatgtcagtggaaatgatcccaagattccctgactggtctgaggctgcatataccctgcactctaatagcccattgatgtcagctcttggctacctgctccagtgaaactcgggtcctaaaagtcaacaggtgctcagtgataaagcagggtacaaggagacaaagagagggtcttagggactgggatccttttgaatggtcctaagaagatatgacatttgttgtttcactaactcctaccaactcatgcctaggtttgctcaaagggcttttgtttctggaggcatatcctgaggtcctgagtgggaagcttagagcttggcccattaaaacagagagctcatttttctttcttttccagaaaagcaaagaagcatcatgggtaatgaaaaaaaaatactgcactaggaggaaccaggagacatgagtttggcctgggatctacatgtactgattcctgtttgactttgtataagcttctttaatttctgctactaagccccctatcaaggtgtttttgttgttgttgttttttctcttatttcctcagatagaattattttatagtcaagctttgttattctagcaaagaaacctggggttatgctttggaaggccatttttttcctgtgtttgaaccaaattgaatttagcaggtgcaaagggctgcagaagagacttggcaattgatagaattatagccaggattcagagggccctcaggagtcctaggcattgactctttgagccctgtgctgaaatcacctctcaagctttcctctatccaggctcttctcttgtgtgtgtaacaccatgccatgcccagccacacttgggaataatctcagattccgtatctttacctctctttttaattttgctgctcagcctctctgtgctgccttcacacatcccattagtcaacgaagtcgtattgattttatatccaaattcctcttaaacccacaccatcttgttcatccccatgttccagtgctgctcctccctcactggactcttataattgctgctttactgtgcatgggatatgagaggtcctccataaatagcatttgaacaaatgcagaatgagataataacacaagtgaaatgacgtgaaacaggcctgagttctcaatcttctacttatatgggatagacatgggttggtatttctagaaataattataggaaagaactaggttcttttgtagtcaactcaccacgtgtctgaagttaccttatttccatctcatgaagatgtttaacaagttcatgtgaaacaaactgtttctactgggaagaccatgtccaagtcttcccacattctgatggaggtgccacaccctcccctgcttctctagggtctcattttaccatcctcattttgccagcctctgggaaacctgatctaagcctatgcaatgctaaaagtgcctgcttaacagcttggaagggaggagaggcaatttatttgctcaactgaattacctgtttacacttctgatctccaaagcatatgtcagaacaagaagagaatagaagaaattgttaacattgcatggaactagggagtccacatataagagaaatttatcacatgaaaatgcttgctttctttggtggtgaatctctttcaccatcagaattgcctccctcctgtcatttaccttgcaacaaattttcctttacaatatctttactcagggtgcctttcctctgaaaacagaaacacctagttgacatctcaccactttgctgctttggttgcagcctagtgatggaatgacaagcccactccataggtgcctctgaatagcttatttcagggagctgcaagacaactatttgctcagaaaattctcacgagggtgatggttttcaaagcaggaaggagagggaattcctggtacacttcccctctgcattgctggagaaatgaagaaacacttgaaggcaaagtcataagtcaggttgaagatggtttctggtggagtggtttggagatttcatctcaagttgagagctgtcctggaatagcttctacctgacttgtttatttctcagctattaatagaaactaacagagtgaggatggtccaggaatctctcccataatgtcctacttcaggacttgaaattctgttagaaattcaattttaatatcatgggataaaacataaatgcatgaatctctttgcagaacccctgccaagggacagccttcaataaatacttacgaagctggacactaggctggttgctacaaatacaaagaaaagcaagtcatatcatttcctaccaaggagctcacaacctggatgatgatgccaattctaagactaacaagaacaggtactagcgtagatggtggtttctatatgctaggtaccattctatgtgctttatgtgctgaagtcattgcattatcacaacaagcctataagactcttaaccctgttttacaggtgaggaaactgggacactgtcttgttaagtgtcttgcctgaagtcacaggattaacatgtacaaggcactatgagagcagagagaaaagaggcgtggtcagggagtaagggagatacatgtacagaccactgatgtggactcatcatctccataactgcccctttgcccttcctttgcattcaaaattattatctctctctcgttcaatttagctatttctatgaaggggtgaaaatccctaacctcttgatatgaatttagcattcaaaggcacctgagatgaggaaggcagaaagtgttcagtataatttgggtctgcttcctgatttttctcaggtttggtcaagaggctgaaaagcaaatagaatgcaatggcaggcacacacacataaggagcttattgaaaagatagatctcaatttctagtatttccaccaggcattatgaccctgacacctttttcagttatggtactctatcagggttactttgattataagtgacaggaaaacccaacccaaactgccttaagccaaaggaaattttagagggtcccataaggagaaagtctaggggttgctctgggtctaggaataccttgatacaagatctcatgtaatattgccgggttttctgttctcttctttgaacttagttctcctcctcttgcctcatgatcacaaaattgatgcagcagctccaacccttactttacttagcttctgtctagggggagatataacagttacttttctgaattatcagaaagagtcctgggcttttctatcgttggccctattaagttacctgcctgtttctagatcagtaactgtgcccatggaaataaactacactgattagcttaggccaatgggtataagaataaatgaaagtggagaaccagtaagtctctgaggaaattcagtttacgctggagaatggtagtgacatcttcaatggaagcttcttgagtgacctatgttatagctctgttagatggcgtggtccctccagggctaacagcatctataatacctatgtttccttattctcctccttacctatcagtatgtctgctctatgctcaggagtattccacagtggctcagtggcatgaataataggaaataatgtctaaatggactataagacataagctggctttttcaatggcccttaagtttcttaactcctgagccagggttcttcttcagaccagagggacctggaacatctttggtcctacagatggtgttggttgggtatcagcatatggggagatacgtgggtgggaggagctgatgtcagaaggcctgagttggaacattggattacaatcaaaggaaaaatcttgagccttcaattgatgaaaaaacctccttagttgaaaaatgcaaaactctggcagactccttctgaggatgatgaagaaaagacaaaactctctgaaataattaaaactccgcaggagggatattattatatatggggttactagaaggggagtcaggattagggttgggattaggggagttattagacagggagtcagggcctcctgccatgggaacttcttgtcagtgatttcttcccttggccctgagataggcagcttggtggagaaggcttatacttcttagctgggtgaccttggataattcacttaatctcgctgggtctagatttcataatctgtaaatgaggataataggaagaccaagttcatgaagaaattatgaaaattaaatgaaaatgttaggtagttatgttcaaactcatgcaagcttggccaatagccaaccatttggtcaacattagtttcagttattttctccctgtctgtaaactctagagtttacaaactcaacaatttggaggtttttcttcccacgcagcacatgacttcacaacactaagcatgtcgatagtgaattaacttgtcattattgtatgggttttattattatgtttgcttttgaattagtattttgagcagttgcatcaaatcacagaacagtggaggggttctgattaagctgagcctttccctgctgcagcacaggccctgggtgagggccatttgtattaggatccctgccttgcccctgactagccagatcactttggtctctgacctcagtgtcctgattagtccacatggggataataataccttcccacaaggttattgtgagaatttgagacaattcctagaaagcctggttcttttatgagctgtgtattcattcattgtcagtgcccactctgtgggattttgcaatttaaaacatcacttccatgcatggctgtctctggaagggtataggcccagaggacctcatctggtgatggggaagccccctaaattgctcatacgtatacatgtaaaatcaaaatccaccagtgcagttctccctgcacctccccctatccaagcatggggccagggtggctgccagattgttttttccaagggttgaccctgttttcatgctcctgtgatttacttacagaagggattatcacattggatgagaggctgaatttcatagacctcaaatgtccttttccaactctgagattttatgtgtctatgttttcatttccaaatagaaaataacccttatcattgctaatggtattcccttaaggaagttacttaatctttctatttctcaatttcttatttgtagaatagaatggattatattccctacatcctaggatgggtgtgagatttaaacaaagaatgcatgtaagatgttcagcacagtgtagtaagacgttaatggtgctcactgatagacatttcttatttgggacataatagagtgacatttcctgactcacttgccattggaaggggctatgtgactaagtctggccagtgagctgtgagcccaataaggtctgtgacttctggatcagggcactgaagtgtgcatgtgtgacttctggcacagcaaccataacattcaacatggtggctgctcagtcagcctgggtcccgagcatcccagccaacataatggcaggtactgtgagagggaaataacttgtggtgtactaaggcacttgaaatttggaggtgtttttttactgttctgtaacttcatctacattgattgatacgcacattgttttatccaagataataataactaatagtacttgggcatttgctatgtgccaggtgagtattggttcacattttgcaataccctagaacatacatattattattaatctcatatttagatggggaaactaaggttagaaatgttaagtaacttacccaaggtcacccagccagtaaggggaagggtggggatttaaacccaggtcacgtgacttcagagcttgagctcttaaccgctgctcacccgactccatagaccaaacctgtggtttcatggtatgatcaactaacattaattctgctttccctttctcttgaactgcatcccctgtagtttcatttggaagtgatttcctttgttggccattactcttcagagtggtggtgaggttgggaagccagcagagtggcctgctgtgggtattgaatgctgatgttgtcataggaagtctctcatttgctttgctttgcttgactactttttggtttttaacctgttatttaagccaaagtatttgatatgggaacaggaagcctcttaagggtaaggaaggcattttgtcttcttacctttgcttgaaggcatcaagatgattgtcttgggtcagagtcagagcctgagatggggattcttctttaagtgatttgttgagggagttcttttggggaaaagctacaaggaagtgagggaggaagagcagggccagggaagctaagcaaagatgtggtatagctgaggtctagctcagcctgatccacagaggagctgagcatgacttgtgacacagagtttgctctgcattgaggcaacagggctaagtttgtttgtttgtttttttggacagagttttactcttgttgcccaggctggagtgcaatggcataatcttggctcaccacaacctccacctactgggttcaagcgattctcctgcctcagctgctggagtagctgggattacaggcatgtgccaccacgcccggctaattttctattttcagtagagacgaggtttctccatgttggtcaggctggtcttgaactcccgacctcaggtggtccggccgaggcctcccaaattgctgggattacaggcatgagccaccgcacctggcctgggctaagcttttatactcctgcatcaggtggttattggccttgggtgtaacctcccagatgtctccaggtgaagtggctcccattagctaaagacaattctgcagagaaggatgaggtgcagcgtaattagcagccaacacctgcagcagttgggggatgagtgcacttgccaggtaaaggagacctggaaggggcaccaaaaacatccactatagtgtttgaggtcagtggcccatctgatacggcttagctctgtgtccccacccaaatttcaccttgaattgtaataatccccatgtgtccatgagagggaccctgtgggaggtaactgaatcatgggggcaggtttttgccatgctgtttttgtgacagtgagtaagtcttatgagatctagtcgttttataaaagagagttcccctgcacatgccctcttgcctgtcagcatgtaagacatgcctttgctcttcctttgccttctgccatgatagtgaggcctccccagccatgtggaactgtgaatccattaaacctttttcctttataaattacccagtcttgggtacgtctttattagcagcatgagaacaggctaatacaccatcctttttggatttgtgatttttttttttctgggggtgatattgtcaagttgagaggaggtagcgaagtgtgtaaggtgtaagtgtagtggtggcatgtggccttgtcagggcctcagcacatgccttttattgacactgaagtgttgtgtgtaggactgtgtaagggcagggtggttgttgtgcacactgtcctgatctttggacctagaactgatacattgtgtctagtcaccaggggagttgtccctttctatctttttagacgggcaagttggctgccaaaaatgtttaggcaattctggtggtgttttcctttctcatgaaataggcggcttcaacctcatagaataagaatcagccactctgcctaacaatattaatactaacaccaatgccctttattaagtgccaggggatttacttgtattaccagatctattcctctccatgaccctgcaagatgggaatcataggatccatttgatggtccagaataataaatattaggaagagtcagcattttgtccaagggcacaccattaaaacagtttgcgtcaaagtagcaaagaaaataaatcacagcatcaaagaacaggagattaagagaaactgaggaaaaaccacacgatctcggaggggtagagaatactatatttataatgaagaagtctgactctttggattaatataaaaatcttgccatgtagcatgtgggagaggagagcaagggaggctcacatgctggagacaggatttggttccaatgctatctgactctaaggctgatacatctttctgtgccatggtgttttaataagcatgtaatttagaaatgtccacccacttacttcggaaccatagatttcattaaaggagagtaaaaacccaggctttggatacagacagacttgagaaacagctctaagatttgggcaaggctggtcttgaactcctgacctctctattcatcctctctatgcctcagtttcctatttgttaaatggggatgatatttagcttgcatgactgtcatatggatgagatgacagcatgtatacaaaatgcctatcatgtaaaaagcacttagtctttaccagttattttaatatattcatgaagaagtttcagttttgtcgaggagaaaagaggctgtgtcagttctttattctctcataacaaactgtcacaacatttggcagcttaaacaataacaatttgttatttcccatgagttgaggggttgactgggtaagccgtccagttagttatatttcatgtaatgttagcttagtcatttatgtggttgcattcagctgtgaacttagctgggcctgggatgtacaggaaggctccttcacaagaccttcacaactcctctccttgctcaattgtctaacccagattcttacatggtgactagatttcaagttctccaaagtggaagcatccctgctgctatggactgaatgtttgtgtccccttgaaattgctatgtcgaagcccttatccccagggtgatggtgtttggaggtaggacatctgggggtcattagagtttgatgaagtcatgacattggagcacttatgatgaaattaatgcttatgaaacgaggaagagatgagatctctgcatgcatgcaccaaggaaggccatgggaggacaaatccagaaacacagctctcaccaagaacccaactatgccggcacactgatctcagacttccaacctgtagaaacatgagatataaatgttcatggtctaatctccatctgctgtactctgttatagcagcctgaactaagacacttgtcttcttaaggtttagcctggaattggtgcaccgtcaattctataagtaaagcaagtcacatggacaatgcggattcaaggggagggaaattaaactcagagtattgttggcagaatggcatgcatgtacttgaaggggaggagtgattggcagccatatttgaagactatctctcttggatacattcatcctagatcattcataaacaaggtgattttatgagaagtttaattcttactgttctgcatttgcagtgcagacatttaccatgatgacttattccctgtagagtgggttaatgttttcagacatggcttcagaggacctggggcttcagttgagccctgaataaaggataggaaattgctatggaaggaaaagaaaagggtctgttgtatgctttgtttttttcactcacatgaaccaggacaaactcagtgtgccttgggtaaggagggtggcgacactgattttaactgtcaaattgatctagagttgtcagatgggataatttaaccctcaaatgaaggtgatttatcctatgtattgtaatcaaatagtcatctaagtcactccccatgagctctggtaaatcacttttagtacatattgaaagtgaccgtattgtattttattgcagaattgcgtcttatagtaataactaatgcatgccattggcttttgctctagcaccgaattacactcacttggaggcacatggatccaggtgggcactgttgcttccatttgcttgtccacagtcagaactgagaggcaggtaggaaaactgtactgctgcagtctttgtagattagctcaattcagagacacctgtggtcttgtgaaatgccaaactttactccagtggcatttgggtcaatgtgaactaggatgggcctagcaattctattaggtgaatgacaagtgctttgtaatgaaacagaaggactttatttaaacagatataaggactggacagaaatcaggcttaaattataccttatctgggctcctgctgtaaccttgtaactggtcttaccacttgtggtctcaagactattttgtcctgcagcccccagagcaatctccctgaaatgcaaggtcaactatgctggcccccggcttaaagccatcatggcttcccaatgcctgtgggatgttgtccacactcttagcttagcttacaaggctctccatagtctggctcctgcccacctgtccagcttcatcttgcgccactgcccattttgaactttccatgctacctacataccgtgattcacttctccacactgttgttcatgtccttctgtctgcctgagatgtgctctcccagcttcctgactctgacctcctttgcctggccaactccttctggtgctggaagatgcaccacaaacatgcccccatgggagcatgcgcagatgctctcaggctgtgctcataatttcctgagtctctcccctcatcatttcacttctcacatagcattattatgacttatttaggcctgtagctctactactagatggactgtgagctccttgaaggcaggaacccatcttaataatatgggtatcccaagaaaccagcacaataactggttggcccagaggagatgctcaataaatgtttgtggtattagtaaatttatgaaaatacctctttgggttgtcacagaagcacatgagcagtggagacaagattctcatcttgaatctgagtctcctttgatctgaggagcttcctgttttgaggttacacatttattttagagacagagtctcactcttgtcccccaggctggagtgcaatggcacgatctggtctcactgcaacctgcacctcctgggttcaagcgattctcctctcttagcctcctgagtagctggaattacaggtgcatgccaccacgcccagctaatttttgtatttttagtagagacagtgttttgccacattggccaggctggtctcaaactcctgacctcagatgatccacccatctcagcctcccaaagtgctgggattacaggcatgagcccccaagcctggcctgaggttgcatatttaggttggaattagtgtgcatgttctccatgaaggtgaaatttgtatggctctgggacctaaaagcctaggcaagggcatagagatatattagcctggggtggactggggaatgttttactagttagcattacgtgagaaattaagcaagtcttacacacatggatttgagacccagaatctgctccatttctggggcttttgtgtgttagaaataagtacagctgattatttcatttatgttggtggatttggggctgccaagcttctctgaagggcccacattttcctttggtactctatttctcattttgcccttagaaataaggaatcttggagtaaattccagaggtggtaggagaagggagaatgcattcccacattggtagctaaggttcataagctcctagaaaagaagggaaagatctctgagcctagaacatgggactcccctttcttactgtaatttgcagacagattggggcaagaaactccatgcagcttggaaacatgtcagagtgtgccttacaaggaaacaaggcaaatacaggaggaaaaaggtaggctgctgtttggtctttagaaacaagcattttcttacatccttttattcccggtatatgtcctatgaaagtcattctggtagcaatggtaatagtactattaataataatgatgtacatatattggatgtgttcaacatgccaggcaccatgccaagctttttacctggcttacttcatttcaatttataactttatgaggcagatacattttcatttctatgttacagatgaggcacagagaggcatagaaacttgcccaagcttggaggagctgggatttcaacttaatctaacacagcactgtatgttctcaagttgtcactatattacctcccaaacaacatttacactaacaagtgcagccaatgtttattgagtgctaactctgtgctgggcacattgccaacctttacatgaagagcctcagttacccctcagcaccatctttggggtgggttattattatccttatttcaaagatcaaacaactgagacttagagattcagtaacatgtccaaggtcacacagctagttcatggtgggacctgagttcattcttaggctgcttgtctcctaagcctctagtccaactttttaatttttttattttattttattttttgatagggtctcactctgtcacccaggctggagtacagtggtgtgatcttggctcactacaactctgcctctcaggcccaagcgattctcctgcctcagcctcctgagtagctgggattacaggtgcttgcctctaccacctggctaatttttgtatttttagtagagatggggtttcaccatgttggccaggcttctcggcctccctgagttctgggattacaggcatgagccaccatgcctggccatagtccaacttttaaattttggtttaggaagtgttttttatcccatccatccagatctccctctcatagtcagttttcacctcttccctggggatacggctcaaggagaactttcatcatcttcaaatgcaaagaccacgtggcaattagagtgtgggggattccaagccccttctggtgattgtggacttgaaaaacagtagtggtaatgaataattaaaggttaaacaaagggaatagttctagagactgggtgaaggggagcctgttttattccactgagtttgaagccagaacaccatgtcttggcactgacatgccttggagacttcgtattgatgatcatggctaactgactctttctcagctctcagtatcattcatagtcaggactttacatgtgtgtgtgtaatgtatatatatctgtgtgcacgtgtgtgcgcgcgcgcgcgcacgcacacacacacacacacacacacacgtaaagtcctgactaccagtgataataatacatagttttttgggggaagaagggatgcctcttgtatgcacagcactcaacttctgcttttgggcagggaagatggaaaaaaaaggtaaaatggggttatttgtcccaagttgacttgacagtctaagcagggggataaggcagatgaatatgtgaacaatgttttggtagattagcttggttagaggattttcaaactttttgaaattataaaacctacaaatatatattttttaaatcacaaaacaaaaccttaatgaatcagtaaaattctcataatctttatacaggaaaggtagtagagaaaagtttatatcagtttgcaactacagatttatgcccttacatatgagtggtagatatgtgaaatatgattattagtaataaagtgaagaggatgttatagagagggatgcaataaaatttatctttttcatcatgttcctcatctgggttaccatgaaactaatgtgaacagtttccagctccaggcaaaacatttacactcctcacctttcagtgctatcatttgttgcatttgggaacaaatgtgcagcttcagggtgagaatggaagaatatataggcaaaagaagagctatgaaatatattaataacgaatattctcacctgaaaactatgaatttcaagatcacacttaaggtccacttcaatttaaaaaatgtcctgaggatctgaataatgacaattggaaaattaaaagagcattgatagcttaagtgccaatgaactcaaggccaagatctcagttttcatgcaaactggtggctctgacttcgttccactgctatagccttggctgaggatcttacaagtgggtttttgaaatggattcgggtggaggctcagggagtgcacctgttacctccatggggcaaaggctcaatgtagggaacttatgagagttggagagcatgatgtgtgctgtgtagacagcacagcatggggacccagcactgccctcatcgacatttctcttagaaaatgtgattacaaggcaggcagatcacaaggtcaagggatcaagaccatcctggccaacatggtgaaaccctgtctctactaaaaatacaaaaattagctgggtgtggtggcatgtgcctgtagtcccagctactcagtaggctgaggcaggagaatctcttgaacccgggaggcggagcttgcagtgagccgagattgtgccattgcactctagcctggtgacagactgagactccatctcaaaaaaaaaaaaaagaaaaaaaagaaaagaaaacgtgattacattgtaggagctggaggattgttactaaatcattcaaaacagcaaaagttaaaaataaaatagcgaccagttaaaaatattccactggtctaacaaggaggatataaataaattatgatgccttatagatataatattaggaatatttttcagccattaaaaactacgttttaggagagtatttaataatggggatattatagataaatacagatagatttaggtataaaatggagactatttctttctttaaagtactttcttgatttttttaagtcagtatatccatctctctttccctagcaaatattctccagagaaacagacaaacatttttcattggccatctctggatataaggtaattttagttttctttctttctttcattttattttttaaaaaagagatggagtctcactatattgctcaggctggcatcaaacttgtgagctcatgcgatctgccctctcagcctaccaatgtgctaggattacaggcacgagccaccacgcctggcctgattttaattttcctatttacatctttctgattaactttttcccttataatcacatattgtctttgcaaccataaaaaaaaagcaacaagcgccagctatttctctagtggcatgttaatcttatgcagtattggaatgggagcaggcagagggcttggtcctagatgctccgtttattagttggctcatggaggataagcctgagcttctgagagtctggggtaaacaagtggccatgccttcctcacaggtccctggaggatcggagaagtgatgtgtgctgtgcaaaggtgaaggtttctagccaaggccactgctggacttgcacttctgcctttctcctgggggtcactttttcactcttcagggcttggctcaaatggtacttccccaggtaaccttccctggcccccacatacgatcaggtttcctctttgaatgcccttgtaacacttcagaactcttatcattgttgcaattttgcattcattcttgaggttattggatgaatgtgtggctcctcctctgaatggtctgtttcgtcacttttgaacatccctccattactggcagatagtagtctctcacaaatgtttggtaaacgaatgaactcttcaatgcaaaggtttagaatcagctggtggggagacagatctagtattttgaggtggttggagggatcatggtgttaaccaagagaaagctcttagcagagtcactgtataatttttttctttgggaaagagtgtgtgcttcaacataccagagagctaaggctttgcactgtaatatgggttaatcaatcaagaaatcaatcaacacctacttatccagtgcagaccatgtgcccagcacaatgctagaggcactaagacttttgggaagtggctttgcctctttctttcagttcacaaaatgaagtggttaagacttgcagaaatcagaagtggaagaatgcaaactgatcagtgattgcaatgactggaaaagggctatgaaacgccagtgcatttgagaccaagcattatggtgatggagtctcacatcctgaaacccagggctaatcctccccaagagagacgtggataggaaaattcccctgataattattgcaaaagtgtcatcttaaaaacaaacaaatatcacaagatgcctccccaaacttgaaagcatgaaacaaaaaagcaaactattcctaatcaggctaattgtagagttagtggctctaaattgtgttggttttgccagttctgccttttggaggtggggacaggggagatttggtttaacttaattagcatttccaactggaaatgtgacaatataactaccctaaactgttgctcagtaaaaatgcagaaggagaattcctcctcagtcacatttatacagaaaccaaggacaggaagagaaagaagacataggctattaggggaaggaatatgtgggctacagatacattcagacgccaaaacttgctgctcattttcaacctctcacctaattttttttctcctcctggaatctatgactataaattcacttctaaggggaaaaaatcagcccatgctcacagcctgctaggagcgcttatacctcccctcctccaaccttccactgcccggtacattattttggaaatttgagcagagttgtctttggaatgacggcgcctcatcaatacagaatttgtgataatctggtccttgggtgggcttgagtttatccacataatggaggtggagtggggagacagaagtatgttaattaagactaaaggcccacaaactcttttcaagtaaagtagccttagctacagctgattcttttctcttagtaaaaacattgataagtttaccaagaccccttgcatgttccctgtctccacatgtgctagaaagtattacgttggtgcaaaagtaattgtaccaataatgcatctgcatttattaagtgtcctttaatgcccacttcactgtagcagtccagttagggactattagcaagggtttatagtattattatgaaagaatctggatactagcagtgagaggaagactttccgcttaaggaaatattgttcccgtaggggcacaaatatatgaacaagcgtctgcaaaaactccaggctagggtcagagcatcttaagtgaattccaggaaagtggtttatagtctagatgaaagagagaaatgcatttagcgggggttcttgaccaaactcaaggctccctctttggatcagagtatggggcctaccttggcgggtgcaggggttcctaggcaggtgggaggtctctatttgtgttgaggttgcagctctcttctccttctacattttatctcctacgtttttgctaccatctggttgttttcttaccacattgttcttgcctctggcctgcagtgggcacccttaagaaaagtccatttagatgtcttctttccttgctagtcttcatgtttgtcagttctgaatttgcatccaatgcctgtcctcagtccctgggccttccccttgatgtcttcaatgtgaaagctattcagccatggggactgtgctcctcccttcaccctcctgtcctccaaggaaaatcaggaagtatctggacagactgttggaacaaagcaaaatatttaagttcctgtcatcgtcccactgtggcttttgatcatttctttcagtagccagtttagtttaattatttatagaaagacattcatagtgctagaggaaatgtcctataaagcatttatcaaagaatgagtctttgtaatctgagacatccccagagcaaaagcaaagtatctgggctgatgattcaggtattacctttggagggaagcaggatgagatttctagagttgctggagtttgaatctctgggttgactcagtagataagcctaaaatctgtaggaggtacaatgcctgtgcacggtcccagtccttccaacaacaaaatgagggggtcattcccatatcatcattatacatggagaaactgaggcacagagaaataaagtacattgcccaaagtttctaaaatacatagtgaagtggaatctagatttagagagaggcagtctggtgtaattgctgtgttcttaatactctggactcctgttgtggacatgctggtcccttggttgttcagtgtctgaggacagtggcttgtctgattttctcagcttcctcgagatggatctacaaattggactgaactacagcctcagaagtttataaggagtttcatcttgataatttggtgggactggaagatgtctttgaccaatagaccagtatccaatgtactcaagatggatcagcctgcttctgccacttcctcgatctttaacttacccaagctatttaatttttgaaagtctctgttttctcacttgtagtttcacagtggtctctcattctgtgttgtgaggataaaagagaagagggagcatgtggaaggcacttggtacatagttaagtgtttcagaaatgtttctagattttagctgaggtcctgtggcatcttagagtattgtccaggaatcttggtggcagtatttcccaaattttagcatgtacaggaatgatctgtgggggaagtgtcaaatctgcatattcccaagccccacccaagtgattcagattggaccaggtggtgctacagtggatgcagccatccagatggcaccactgagaaagctggctcacaggccagcaggggcccctcccaccccttgactaaaccctctgcattccttcagactcttcttaccctgaatggagagtgctagaaacgttcttagtagctttctaaaggctttataaggccaacgagtaataatttggtgatttcagaagcagccctcagaataatatattttctaccccttcccccacccactcttggctcctggccctacctccttcacccctcttcgatttgtaccacagttcgtggcattttctgaacctcagggctcctgtctggctagttatttatttagctgaggaactgcagcacctaattaataggaaattagctgtgagtgtaacatttggcccgtagtcaaggcccaagaagttataaatacgcaccacgtgagtggcctgggcacctgattcttggaagatccagaagtggcacttcctgtgcagttccaggaagtgaagtatgtgctgcataggttgtgggtagccaggagcaggcatcacctgccctgaggccagcaggaccatcctggggagcacaggggcctgtctgcttctccccatttcccagagagctcattgactcttctcaacttagctgtcttttcaaaggccaggtgggagaggacacatcaaggaaatgagagcagaggctggaggggacttaggagagggtatagggtcccttacagggtggcccaagcaccgtgatcctccaaagacactaggtctgctgttgtttcagacacttgcattggcttcttccaggggcacgtgaggtacagcttcatctaacaccttgacagtagggactctgcattgaaggggatctcactgccattcacaggttgcagaggaaggggaaaaatcttttccttctactcttctaggttcctggctggggcccctataacaaaagatggattaagaagagaatagcacacaaaattatttactatgttttatgtaacaggggagccttcataaggtaaccaagatttgaagaacagttaaccctgggtgttttttatggcagtcttgatgaagagtgaaaaggcatggagaaacttgatagggcaaacagtgtgaggtaagcatagtgaactccaggaaatgtagctgggcctgtctggattcctccctgggtccctagtcttggcagataagtatgctcccttcctctgggcacctctcatgtgacctgcttcaggggaaggtcagaaaattcttcctgggttttctcaaatttttttagattaaaatattcaacatgccaaagtgctgtattttggggtagtgtgttctgaaccccatcacagaccatgggaactgagcctagaggaggttagagatcctgcccaaaccagagagaggcagagttcagatttggaataaacatgttcagccctcaagtttgatgctgtttgcagaatctcatagtttcctgattacttcaaaaggaaaatcaggctgggaggagaaaaatgtttttaaaagccccaaggaggaaaagactgagggggaaggaggagcaaaagggtcaaggggaaggtaagggcaagtctaggagttccttaggaggcagcggtgcccccacggaaggaggaggcggtgtctgtgggtcagaggcaaagctattttctctagatttgcttgatttcagttatctcactttcttttttctcaacttcccctgcagggaaataggaactgggcaacctgtctattcccttgtgcgagttaaaaatctgctgataaaagtacctattccaattctaagtgtgtttgttatgagccaaaccctggagggtgggaggagggaggtgcctggttccatggcagagcagggccaggaggtaaagctggttggaggacatcagggaacagaaagcacagagtaagtgaaatattttgccagctttatttaaaagatcgatcgaagcctctttaacacaggcttctacctgagaactggtataatgaatctggcatttatgtgactctggaaggagccttccgaaggaggagaaaaatgtaaaagaaattgcatctttgggtgggtcccagaaggggttgatatgaagaaagaaaataactcattgctgatgtcacagagcagaagatggacatggaggctgcatatcacttagactaagtgggacagagtctcccttggaaagaaaaaatgcctctagtctcactcagggaagcaagttatcaatcagagcccaggctaagaacacagatatcactgatgccctgaaagaaagataatacatcttccttttcccacctctacccattagccagaggcatttcctgaccttccactgaagaagaaaggggtccctcctgatttcttgtcctttgggggatgttaccaattctttactatcccaggcagtgcttaggcaccaaatgactttggagtcagaaagagctgagttcaaacatcacattcctgcctgtgagtttggacatgtttgattatctcttgatgacctcagttttctgatttgtttaaaaatataagataatatctactttacagggtttttaaaaggactaaatgaggtaaaagtcaaaaccacaaacatagcacctgccatgtagttgagacttaagaataataagtattgctgttattgttatgcaaataaaagaatcaagaataatacttggtagccactcaataatcagtttctgttcccttgttaaaggtcacatcagtaatagtgatgctagacattttgtctccctccacaactctcccctaattcaaccctaagccaaaacttaggccaacatcaaccctattcccaacaatatgcccagctgtattccccaatcctaaccccaacctagactaaactataaccccaactctatctcaatttccaactctatcccaactatattattcagggttcttcggagaaacagaaccaataggatgtgtatgtataatatgcctctctcctattgagagagagtgaaagagggagaggggagagagacagtgagagaggacagaagagagatttttattaaaagaaattggctcacgtgattatggaggctgaaaagtcccaagctctacagggtgagttggcaagctggagacccaggaaagctgatgttgtagttctagtctaaagactggcaggtctgagattgaggaagagccagtgtttcagttcaaaggccattagacaggacagattctgtcttactgcgggaggtcagcctttgtgttctattctgctcttcacccaattgcatgaagcctatgcacagtcaatctgttttattcaacctacaaatttaactgttaatctcacccaaaaaaacgccctaacagaaacaactagaataatgtttgttcaagtatctgggtacctgatagcccaatcaactttgcacctaaaattaatcattttaatcatcacaccaatcttatccttaaccctattcccagtgatattacaaccctaaccctaagtctaaccccaacctcagaccaataattactattattattattattttttgagacagagtcttgctctgtcacccaggctagagtacagtggcataatcttggctcactgcaaccctccacctcttgggttcaagcaattctcgtgcctctgcctcctgagtagctggaattaaaagtgtgtgcaaacatatatatatatattttttgtatatttagtagagatggggttttgctatgttggtcaggctggtcttgaactcctgacctcaagcaatccacccgcctcggcctcccaaagtgctgggattacaggcatgagccaccacgcccagtcagtaattactattaaatatgcaacatgtgctagatattgttagttcctcagctttcttctttttagtgtggatacaaatcctactctagttgccaaaacttattaatcaatgtgatgaatccgcatcataaagtcaacttaataatatatctccagagtatggacttgaaagggagctgtgcttggaatagattttactcagatagtcacacaagatgatcagcacctgctttggcatgaggagccactcaggcacacagagggagttctatttgttgtgccagctcctgctccattctcctgaccaagccctgctttaatagggtctgtgtggagttaagatggccagtgatggaggcctgggcacaacaccccagagatgtcttaactcagagaagatagatttgtagaccattaggagctgaaaatatgtgttagtattattactcatatagatcacttagttttctgtcagatttttgtctcagacttatcccctatgatgaaaaggaaacttcttgatttctacaaagattcctactgaatcaatgagcattagaattgaaagggatgggctgagcatggtgggtcatgcctgtaatcccagcactttgggaggccaaggcaggaagattgcttgaggccagatgtttgagagcagcgtaggcaacatagcaagaccccacctctaaaacaaatgtttaaaaaaattagctgggtatggtgttgcacgtctacagtcccagccactcgggaggctaaggtgggaagaccacatgagcccaggaggtcaaggctgcagtgagcagtgatcacaccactgcactctagcctgggtgacagagcaacaccctgtctcaatttttgaaaaatgaaaaagaataattattttatcccattgttctcaactttaaaatcactgatgcttgagtcttgtcttggagcaatccatccatctgtggggtgaaccctgggaattagtatttttagaggcactcttctagcgttactatggctaaatgtttccaccagtctggctaaaacttctcatttcatggatggaaaaagtgagactcaaagaggctaagtgactttcataaaagcagacttgcagggacaaagccagcacctaaggttttataaatactagtccagtgctcttgttcagacaccacattccttctcatcttgtttcctcagatttatagccaaaaacaatgggaccatcagggacccaccttaggaccctcatagcgagtggtcctccagctcagcccatgtgcatccagctgaaaggctttcatacctctgccctgcataggtcttgttcagagaagtgggtgcactgtggcagaaacaattctctactaacccatttggaacaataaagaaataaatcctaatccaccaaccttgaccagacagctgaaggttgtgctcacttggtactgaccttgtaaagatggattgcaattttggggagtcgattttattttgtttttatgtttatttttccttctgggtacctagagttcatattcatcctagagagttctgggaattgcaggtccaatgctattagcatctgcttcattcctctgcctttctgcccaactcccttgttttctaattcttaaaaaatttttctattttttaagacaatttatactgaatgaattgttattttaaaataggtgagtgaaatccaccttaagtactgatttgatgtatttagaaaatatggaggcctctgaagcagaccagcaaggcagcctgtgtatttcccctaggtgtggttccctctttattaccagagggtacataggagattctgcattcatttagtcattcattcaaataatgtttatggatttaattttctttaggtccagggaacttgataggcactaagggaaactaaggtgaattactgtcatcgcttgacctcaagaagcttaaatctaatgggaagggaagaagagtatcctcgaacacccgtactgtatgcaatgtgatgttccctaagggtatggcaataggagtataggaatgagtgggattatttctagctgaggatcagggaaggttctgttgatgatttgacattttagctcagttttggaaaattgatgtgattttgacagaaataagtataaatcttttgtgtaggcaaaggaacagctggagcaaagaaagacaaaggggagggaaagtatgtgcttgtgtgttggggagtatatctttggtcttcatatgataggtaggagggagcatctgaaaaaaaaattatgtgtagacctcacggatgcttatgggttgaaactggctttagtgactggtctacttcctcagttttacagattataaagtaataataataatagcaatatttgaacttaactctcattgcatgctttctataggcagttactgaactacagccattacatgaattttctcattattttcttacaacattccttggaggtaagtattattattatccccactttgcagatgaggaatctaaggctcataggtcagtaagccagtaaaaggcagagttgggatttgaacccaaggctacactctttccgtggccaggattttaaccggggtattcagtactggtgccattatgggggaggaaaagatgatggattcattttggacatgttgagttagaggggcccatgagacctccaggagaagaggtgagtctgaagcttgaagatggaataatttgaaataaaatgaatttgtttctgaaagttgtatcctaacgttggcatattcagaacaccagtcacattgacttgccctgcagaatttccagatgggaattctagcagctcacatgccaaggctgctccttagtgtgtgtatggcttgccagacccatcttccaaagctgcactcaggttttttttttttttgacatgtctcagctcctttctccaccatgtgtgcctgcagtactgtctccttttatctaaaggtgttttgcaacttgaccccttgctgcctgccaaggtttacctctgagaagtatcaagctgttcagcattggctagaacaagctcttctgaccctgtcgacccaacagtgaaaaagtgtcagtgtagggaagcggaagatgttaagcatgtgcatgaggaaggaaatagtttctttccagcaggtgagaagcccagagagttttggtggcctgggcaagctcctatgcctcaggtgaaaaagagaagttcagtaaagctgccttgcctggttttaagttatattgtcttctaattccttcttccctcaccttcctcttgtcctaataccttcaactccaagtctcttgtcatttcctgacagactggcaggtatacctgacagactggtataattgttggaatcaggaatgtctgaccaatggggaaactgtggcagtaaggagtggagaaaacttagtgaagggcttgcagtccatgactaagaacacagacttcacgtgatcctgtaagaagacccgtcagggaagagatctaagggttggagtctgtattattcttctattgctgctgtcacaaattacctcaaacttagtggcttaaaacaagatacgtttattagctcacggttctgtaggtcagaagcaaaagcaggctttgatgagtccccctccttagggtcttacaaggctgcaatcaaggtgttgcctgggtgggctcttatctgcagattctgggaagaacccctatccaagctcaggcctattgttggccaaattctatgcctcacagttatgggattgaagtccccattttttttcttgttgtcagccaagagctactcttagctcctaagggtctcttggattccttgtcacgttgcctacatctttgagtgtagcaatggttcatcaaatcctacttatgcttcaaatctctgatttctgctacttgctggtgaaaatgctctgccttttaaaggctcatgtgattctattgggcccacctagataatcttccttttgccatgtacgttagcttgctaggactgccgtaacaagctgggtggctactgtgtttgaatgtgtcccccaaagtttatatgttgggtacttagtccccaatgcaacaatgtgagagttgggacctttaagaggtgattaggtcacgtgggctgtaccctatgaatggatttgtgtcattatcaagggagaacattagttatcattgaagtaggttcctgatgaaaggatgagtttagctcccttcccttttcttgcgtgcatgctctcttctatcttccactatgggatgatgcagcaagaaggccctcccaagatgtgggctccttgaccttggacttcttagcttccagaaacggtaagaaataaatctctgctctttataaattacccagtctccagtattctattatagcagtacaaaatggactaaaacagtggctcggacaacaaaattttgttgcctcccagttctgaaggctagaagtctgaagtgaagttactgatgctccttgacttacaacgaggtgatgtcctgacaaacccatggtaagttgaaaatattgtaagttgaaaatacatttaatacaccaaacctaccaaacatcatagcttagcccagcctacgttaaacatgctcagaacccttatgttaccttacaattgggcaaaatcataaggcaaatcctgttttacagtaaaatgttgaatatctcatgtaatttatcgaaatgttgtactgaaagtgaaaaacagaatggttgtatgggtgctcaaagtaaggtgactactgaatgcgtaacactttcacaccatcgtaaagctgaaaaattgtcagtcaaatcttcccaagtcagggaccgtctgtattggcaagattgattccttctgagggttgtgagggagggatctgttccaggcctctctttggcttgtagatagatgactgtcttcatatttgtatggtgttttccttgtccaaatttccttttttatcaggacatctagtcatattggatttaggccaaccctaatgaccccatcataactaattacatctgttaccatgtttccaagtaaggacacagcatcctgagatactggggtttaggacttcagcatatgaatttagggggatgcaattaaactcatagcaccatatatcatacataatcataacagtcacatcttatttgctcatactcaaaagggagggatttggacaaaggtgagggtcattggaggtcattcttagaattctgcttgtcaccctgcctctgagtcaggatacctgctcagagggatgtgaggacagctatgatgaataaaaagaatactgctgaccatggtgagaacagctacagaggagtgggtgaaggccatgatcaatgggttgcaagtgaacaagaagtgaagaaaatgcagagactgctccactcaagaagcagctgtggccaagaggaggccaggtggtgagaagagagggaaacagaggtgaataacagttccactaaaatccaagagacctgagcttgctagttgtctagagacaactgacagagaggggcttgcaggcggctaaagccattcaacaatttctggttgtccacatgccccttctatgggaacttgacttggtaccaggtagaggattttgtagaactccacatgttattaaatggcctttgcaaagagacttgtgtgcaatctggctgaattatagttcctttggagattcatgtttgcttacttgtggctctgtaactctcagccttaatatcacagaaatgcatttctatctggtcttcacttccctgattctttaaaaattttatgtgattgttcttggaaggaaagctttggtggaatccagacatagtattggccactattgattgagggtctgctgtatgacaggccctgtgagaagggtgcatgtatattagtccttatttcctttttaccaggtagattgttaccttcatttcacaaatggggaaactgagtctcagaaagcttcagggctgtggctgaggttatagcattgctaagcagtattgctctgcctcctgggttagtcaccgcactcacattaaagacctttttcttctgaaagttggcaattttcttttgtcttgataaatgttattttcctaggatgtacttagagcaataaatgttctgtgaaaacaaaagtgtagtgttcactttctattcccctcccagtcccaaacttctgggcttcccagttcacctatttgagaaattacttagtgaaacattttcatctcccacccagaataattcattgccaggcaaagaacaatgcagagacattacagccagtgagactttttccaaaggtcacacatcgacgtccagggatttgtgatggacacagtgcccaaggcacaacatcacatttgcttctctttctggatgcgtttcatcatgaaagggtttgcaagcctccatctgctgacttgcagtgggctgttccccaaaatgcatgccttgttctcatttccaaggagaattgcaaatcttagaaggtattttaagggaatatgacaggagcaggaacccagagcaattggaattcagagtggtggagtgaagaatcagcaggcatggctgccagagtttgtaggcttgagaagcaatgaattctgccaggagtgagagtgcttggtgaaaaccctggaaagaaaatcacaggttaactgggttttagaggcagtgtaggaatctgtcaggtgggcagcaggtagaaggtgggagagaagaacatctcaggtataggagagatacacaggtttaaatgtcagtgctgtggtgccaagtggctcaagtataattgagtatattagtaatgatgccaaccgcccccgtaataataaacacatacatttttatgtcacctactgtatgtcagggtacattaattatattctaagcacattaattatattaactcgtatattcctcagtgcaaccacacaaggtgaatactgttattatccttgctttacagatcaggaaactgaggcacaaggaggaaaataatcatgccaaagaactatcaatgagcagattggggattttattccagcagtttactctacagcagctctgtccagtggaaatttcagtgatgatggaaatgttttgaatccttgcttttagcaaggaagccaccacccacatgtgctattgagcacttgaaatgtggctcgtgagacacatgaattttacattttaattttgatttattatatttaaatgtagacaggcacatgcggctagtgaggacagtattggacaacacagttagttagagtctgcttatctataaccccctgctgcctttcaaattggggagtgtcaagttgattctgtcatgatagttctagcattaaaaaccaccacaggaatcatggccatcatttatttagctcttatgtgcagggcaacatgctcagtgcttcctgtgggttatttcatgtaatatccatgacaaccttatgggtgatggctaagagcatgaactctggcaggtttgaactaccagtgttcaaaacccagctctgctatttgttagttctgcagccttcagcaagttgcttatcctttctatgcctcagtttcctcatttggaaaatggagtaaataatagcatccccttcatgtggttgttatgatgatcaagaggctgtcctttggaagacagcacagtgcctgacatgggacaaattcagtatctgaaggtattgttattattacccttatactttagatgaagaaaccaaggcatggaaaggtaaagtatcatgctgaaaggtacagctaactgagggagagttggaattcaacccacaggtagcctgatttcaaagttcaggttcttaacaattatatggtggtttatttttttcttttcttttctttttctttttttttttttatttttgagacagagtctcactctgttgcccaggctggagtgcagtggcatgatctcagctcactgcaacctctgcctcctgggttcaagtgattcccttgtctcagtctcctgagtagctgggattacaggcatgcgccatgatgcccggctaagttttgtagttttagtagagacagggtttcctcatgttggccaggctggtcttgaactcctgacctcaagtgatccacctgccttggcctctcaaagtgctgagattacaggtgtgatgagcccagcccatcctgtggtttccgatcacagtttctaaaattgtggtttgtggagaactggtactaaaatgcttcagagtgcttgttgaaaatatgattgcctagactcactaaaaactgttcaattagacttttggggtcagagacctgggaatctgcattttaataaatttcccaggtgatttttcatgaacaccttaactaataataaatcaattaaaaaatttaacggtaagagaagtagaaggagagaccaggttttcagatgtagaagataccctggagagtagggttattctgcaaacagacttaattttagaaagatctttctggtggctggtgttgaagatggacttgataaagaacgtcctgggggtagatgtggggtgtggtgatggggctcattagtacagtgacagagtggacagggagggagggacagattctttggatgttttatagtaaaattgacaggatatggtagattactagaaactgaggagaaggaaaattaattgagaatcaaaaataatcctcaggtttctatgacacctgagtgggtaatgatattattaaccaagatggacaaggaattttggagattcagataaacttgaggacttctttggacatccaggtggagagaatcattaagcagctggaaatttggttttgagttcaaaagaggaatatatagcaaaaataaagtttggtgtcctgtcaacactaggggtggtatgtgacctgtgcagtgggtgagattgtcttggagaaactaagtggcaaggctcagcaactcaaatattgccaagggtgaggggttgaaacaagtgtgtgtagtggcctggtataagagaacaggtgttaagctgcttttattgcagctaatctaataactgcccaatcacacagcttttgaaaacactctatcagccacttagctgtacgacactgccccaagctcttagcctctacacacctggcacctcggggtctaagcctactgggtctgaccctattgagagcactcgggtgctgcccatgccagaagagaaggtcaccaaagcctagcccctgagggacaataacactcgagggctaagaacaggagctagtgaaagaggcataggaaaagtagatagaaaagaagtaggagaacaaggacacagctgtgttggagaggctgaaagaaagaaggatttcaatgagagggttgtcagcaagccacatgccaccaagagctcaagctgaagcctggggagaagttttggcatagacttgacaagctggacgtgcttggtgtcttttgccaccagtagagtaatgggggatggagccagggagggaatgagagtcgcaagtggaggcaaagaacatagattactttcttcagtggggaaaggaatgtgaaggtcacttgcttgagggggagacatggttggcacggggttgtttgtaggataagtggggcttgatcatgtttgtagggagagggaacacagagccagtggggtagaaggatctgaagatagttaaaaaaaatgacttttggatcaaaaccccagaggagggaagaatagtttgtatcttgaaaaaaaccagggtacctctttctttgggctaggaggaaaaggtagagaaaagcttagatctaggggcaagaatttgtaattggaattcttgcaagtgtaaatctaggttgtctgtttaaaacaagggcattggtgaagaacaaggataaacgtggtaatgtctacagcacattgagcatctgcacctgtgtgccaggcattgtttagcgctctttgggaattgtcttttttattcctgaaaggcaaatgtaattggcatacccattttacagcccacaaagagaagttaattgcctgtggtcacgcagctagtaagtggttgagctgagatcagatcccaggaagtctgagttcagagcttgctgtagctgctatacagtgtaataaagcagcaataatgatgacttgcattctcatagtactttttttcttaaaactttatccctattttacaggtgtggaaaccaaggcagaatttttacaggtgtggaaaccaaggcgaaatttgctcaactcatcacgcatcttggtagggtcagagctaggactggagctggggtctcttactttctagtcctgttctgcttcccaggaagcgaacacccacaagtagctcctgagtaaattatgttgcatttctgacatctcattccctctcttcctccttctattccagtctgcctactcctaccctgatctggaccccaggccccaaatgccaggaaggtggcctggcacctgctccttccttttggctggaatctttgtcctcccacatgagggcattgcccgcattccccaccaccactgccttgccttagtatgaggggcctcatgcaggcaagcagtggagtagaaggccgcatttgttttgcttttattgttaaataatataaatctcttggctgcaccaccggccagtacgtgagttgtgtgtcttcctgcatagttgctaatgagacagttaatcatttgtttattttgtatgaagagaggtggcagccatatctctcaaaccagacattgggctccaggaccctcagggaagctgcccacccctggcacatgagtcacccacagtcccagcacaatcctgccctgcaggccccatcaccttcttccctgaggaatggccaagatgcaggcatcagctgatgatgatgatgattactgttattgcagctattatttttataaatactcccttccttgagatgcaaaaaaaaaaaaatgtaatttgcaaagatgctttgttgggagataagtaggcttcctcttgggcacggagtttatctcactcgtgcataggttcctagaggtcgtgcaactcacgagataaagctccaggatcctccccagggaaggccagagtcagtgttcagctgttttcctagatccagggttaaagaggtgaaatcaactatgttcgtcctgtaggctccctggggccgaggctgcttttattagagcaaatcaggcctgtccagaagctgtgctatgggggaggagagagccaggaggaggtgaggaggggttggggtggggtgtgctgcagggattgctgtctgcacctgggctgcccaaactgaatgattgtcttaaagggctcccatctcatcgatttgcatgctgtcagcatcctcctgctattttcttggtgtttgtacaaatcctattgcccgaagcttaaatttcaattaactgggtccaactgtctgtgtcctgaggcacagggaatgggctggggttgctttgttttctgctgcggcactccatccttggcagtctgtctgtctgtcttgaacctcctgtcctgaaggctgcacctctctgtgaattgcttgcattccacagtcaggggcagaattacccagggcagggcttatgttttaggagtagttgatggctagatcaagaaacaggagcatgcagtggagtggaatcatccccttaccatggttgatttctagctttctgcttccccctgtgacatggtgagatgcttttatttttacttcctcatccagatatattcttgatctcatccttctttctcctccctattttcttcttctaaatatgtctttttaacctctgcatctttgttcttgcaatttccttcatcagaattttcttcccttccttttcctaccaatccttatcaaaatccatccttcacagctcaattcaagcgtcactccctccaggaagccctcccactgtccttcccagaagacttgaccttgctttctgtgcttccgattccttggatctcacagttctcccttcttagagtcagagctagcatctcattctgtacatcccacagtacagtatcacaccattcatattattttttttttttggttttgagtttgttctggttgagttttgttgtggattgaatggtggttcccccaaaagatatgttacatcttaattgctggaacttgtcaatgttaccttattggaaaaaatggtcatagcagatgtaatgaagttaaggatcttgagaagatggagagatcatcctggattagccagacggccctacatttaatgagaagcgtttatgtaagaaatacatagctgggtgcagtggctcacacctgtaatcccagcactttgggaggcccaggcaggtgggtcatctgaggtcaggagttcaagcagcctggccagcatggtgaaaccctgtctctactaaaaatacaaaaaattagccaggcgtggtggcggggacctgtagtcccagctactcgggaggctgaggcaggagaatggtgtgaactcaggaggtggagcttgcagtgagctgagatcttgccactgcactccatcctgcgtgacagagcgagactctgtctcaaaaagaaaaaaaaaaaaaaaaggttaggtgattgtggtggtgcatgactgtagtcccaactttgggaggctgggacaggagaatcgcttaaacctgggaggcagacgtcacggtaagcagagatcatgccaccgtactccagcctgggcaacagagggagaccctgtcaccccccagaaaaaaaggaaaaaaaaaaaaagaaatacacagggaagatttgacagaaagaggaggagacagtgatatgaagatggagacagagatgagaacgatgtggccacaggccaaggaattctggcagccaccagaagctggaagaagccaggaaggattatccccaagagccttcagagggagcatggccctgccaacacctagatttcagactgttggcctccagaactgtaagacaataagtttctgctgttctaagccatccagtctgtggcaatttgttacagtagccctaggaaagaaagggttctccttctctgaaagggaagacagggagaggcaggaagaaaacaaaataccagcatgaggaacctgtacccttccttccagattttattatcagcttgggtccttctgttttatttcatacaatccaagtcctgttactcccacaccaggccttgggttgtctaggcagctgggtgaaaggccacatttgttttgcttttattgttaaacaacataaggacagggccttgtcatgtgagaacatcaatactgaataaataatatatttataataccaataagagcaattgacatttgtatagcctttacaacttacagattactctgacttacctcattgcgttttgtatttatggtaaacctgagaggtggttgttgagatcctcattttacatttgaggaaatggacagaggtgggaaggggcttgtgtatgaccatacagcagatgtggttgggccaacgctaaaccatcttttggttccaaatctatttcctttaactgtgcacataatattctttgattatgagacccagtaggtcaaatctgtttttaaaattcttttcaaaatgggaatatcctttgcctgagctagggatacctggtttccttcttttcctcaaggtgtgctcaaactcagcagggtttggtagtagtggagaggctgagagaaagccctgcttattcaggggtctttgttttacaagttgtctctgtatgttgatcctctgttattgtttgggtaggcactggggaacctctgtgcttgcatgtgggcatgtacacacatgcactgtgcgctctgccagctgttatccccctctggtgctcactggcataaatctgccacctgatcatctaaaatcccagtgaaaggaaaattgccaggccaggagggtccaggggagaatcaatatatctagtatagtttatatttgtaccttctctccttaagagttacagtgagtgactctactcctcaaatggagcacctctctccaggagagtaagaagatcacataaatagaaagtgagctttggactctaacagacataggttcatattcaactctgctacttaatatccatattggtttgagttatttaaccttgacaatccacactgtaaaatgggtaaataataaataccctcctctcagaagtgttacaaagtttatatgaaataatgtgcttaaaaagctgggtacatagtaggagcttagtcattgtttattttctccctcatacccatacatgattcattctactgttaaaattatgcttctattgtaaccacactgtcatcagggaacagttagtagcattaggttggtgcaaaagtaattgtgtttttttgtcattacttttaaaggcaaaaacagcaatgactttttcaccaacctaatagttttgtcacattgtcctctagtaatgatgccctttttgcaaaggggaagccaagggcttgaagagaggaactgaaatattaagatttcacatcaaatcagagttagggcttaaatagaagtaaaggcactcattttcccactttagtgggaagggaaataaaccaacatttattgacctcctaatataagccatgtccttccctcaaatattttattctcacaagaacatgatgacatgaatagtgatattatccccattttacagatgaggaaacaggcttagaggatttcagttgctgtaggttacttagcagagaggctgccctccttcccagggttcctggccccagggtgcccagctcctgtgtttttctgctccatcatgcggctttcctcggagtcctggggaaaatacagctcaaggagggtccatgtgtaaggatgaatcaagaggagcatctcattatcacccctagttgtcaaagaacagaatctacagccccttgttgcttgtttcctcccagtcattcagctctcaggagtggagttaagatggaacctgactggtaatgtaatgcaggacccaaggtgtttcccataggtcatgttgtttatggatctgatgtccattatcatttgaaggagtgtttggccaggcgcagtggctcatgcctgtaatcccagcactttgggaggctgaggcgggtggatgatctgaggtcaggagtttgagaccagcttggccaacatagtgaaactgcgtctctactaaaaatacaaaatgagccgggcctcatggtggatacctgtaatcccagctactcgggaggctgaggcagaagaaccacgtgaacccgggaggcagaggttgcagtgagccgagatcgcaccactgcactccagcctgggcaataagggcaaaactctgtctcaaaaaaaaaaaaaaaaaaaaaaaaaaaaaggagtgtttgagtaagggagtaaggccacccaagatatttaatacaaggcaggttgtaagtttaagtgagtatagttggagtaaaaatagaagaaattatatctgttcttaaattaaactccagggctgtgttttgcgaaccaattaactaaaacttggagtcatcctgttaggctttgctgagcagtggagggacttgtggggaaatgtggttgcaaaggagacaggagggaagctgaggaggctgaggagccacagatgagctagggagatgcttgcagcatagcacgtcttcctgtttggttattggaaaacctgggtcctagttcttgatctactagctctgcagcataggagtcattatctctccggaactcaggttgtaaaataaaaaggtccaaccagatgatatctagggttccattcagatataagcgtgtgctgttttttgaatgttagtgcagccagagggcctgaaaagtgacggggaggcagagagccttatcagatagaacaagcagcatttcagcagggtgcagaaggagctttggtggctgtctctgtatgtgcactgggtggagaaatgagtgtgggcattgtggttgcattaggcccctccccatgttctctgttctacagtgccttgagcacagctttattatcttaaagcatttaccaagttctagtgtctttgggcagcaagtccctcaacagactgtgagctccatgatgggaaagaccaactattgttcactgtgatagttgaaaaaatgaatgcatccaaatgcttttggattccagtttctctagagatgtcttttatgtgtcatttttgtagtttggtctcttctcaatggaataatagatactaaatatcatattaggatgggcaggtgaaagtgagtcagtgcttgcagagatagatgaacattggaagctgttcttgaggttctgttcagaaagcctgctcgctcttagtccctttcctgcttgtgggagagtgggggtaaagcttcccggcaaagtgtgagtggcaggcaagcctagctattcattggctcacagcttcggcatagaccccatgcccattgctggcctatggcaaggcacagcaagcttgacagtgcgtgcacctgaccttgcccataaccattaatcagccatcatgtccacagtcttccccacttctataaactactgggacagtcactggaggaactgtcattttttaactcagcgcaagttttgttcgctttagatttttgggctactcccacaatttagcctattccctctcttttttccccaaattttatttttatcttggtaccaggtcaatgagttgagtggggcctggggaaggatgataaaaaagaccaaagatacacatgcaagatgggggcgtgcttatgaaactgtccactggacacccactatgtgcttaacattatgctctaggcttttttttttttccattataacatcatcatttcccggatgctttcctcatggcctctctatgtaaggtatacttcatacttgctattatagttaaagttgatgacataacatttaagtgtctaggccaggacctggcacaaagtaagaacttagtagacattaattgatgttgttgctactgtgttcacatttgatagtttaagggtcttcatgatattctgcaatgtaaaaggagaaaacaaacttggttagttggagatagtccatcatttgtagagcaggataaatattgctgatcattaaatcatctcagactttaacaggtgaagaatgagtagctgccctggttaaagatcgcatttgcctcaacctaagttggggctcagaaggggaggggaaggtgtctgttccagtctctgatttgtttctaagtgatttttattgccatcacttctaggtgtctaagtgatttttattgccatcaacttctagttctcaggatgcatgacatggtccctcattccagaatccagcctctgagctttactcgccatttaaagaatggtgttgggcctgagtgtttctgtccatggtgctaaacacagaactctgggactcaaaagcagatggtactacatggtcactctcatctccatagcctgcgagatgagactgctgtgaaaagaaggctggtttgggagttaggaggtctagtacagtttcaatcacttgctgtgttgcctcaggcaaaccacctaacctgtctgttgcagtgttcccattggtaaaatcgagttgctgcattctgtcattcatatttcagagtgctgctgatttctgtgtgagtaaatgagataacagatgctaaagtgggatatgaatgcatagtatgattatgctgcaattgcctctcattcttttaatcatacattttgactgtatcgttttaatttacggaggcaccctaaggcctaataacatataatgcagcatgcaggaaatcaaacaaacagataaatgcactggaggaagaaagaaataacttttttaatatgttgtttgcaagtggctgtatggctgtagaacctggggtgtgtttctaagaggaaagataatgaccagtgaggggccagcccttgtctggaaggagagaaaaactcataaaatctcatcaccactccaagccccaaaggggagacccactttactgtcacagtcctgaaatctcaacattagcttgatttccttttttagcttggtattccttgtccttcacagaatagttgcaatctccctttttgagttaatcatgcttgctatggcctgagatttgaaaatggagtctgtgggtttaagttcttcttttcctagttatagaaacttcataaagcaagtgaggctcttatagcctacctttcttcatctgtgaaatgggctcagtagtcataatatctccatatgggatgattgaaaagatacagttgtaaaaatgggccttataaaaatgtaccagtagttgtcattgttattccctgacatgctctgttcaaagtattgcatgagcaggttttgccttttccccatcctgtgcctttgtgtgttctattctttttactgggtgtatcttcttcatctcttcttttaaaaatctcactcctttaaagcacaggtcaaatactaccttctttgacctccccaaccataataattttttcctttctagaactcctagatagtctatcatctttactgttcaacttatgatctccttgcacggtggcatctagtttagtcattttttttactttcctaaatagattataagaccctgaaagacggctacttatctagcacagtgtgtagcacagagcaattgcccaatacctgttttaattggaatgcaggatgaatattacacagcactcatggccttaggcttttgtaaaaatacaagcgttgctggaggaggtgactcaataggtcatgggtacttgcatatgcattaagaacattgggtttgggtagccaaatgaaggtggaaaatctggaaagaacaagttgaataaagaagcaggagctgctaaaacacgtttttttcactgtagcagtttttcctaggctagtcctggtcttggaggtgctgtgaaaccagtgtattgacttggaaagatcccttagatctctgaactgggacaagggttgcaattcacggacaccggatgttgtgcaatattcaggtctgccagaaggtggcgcattatcactaatttcatggtctggcagctttgctcctggggatccccaaagttggtgtgggcattctgatgggtagctctcctccgcattttgtgtggttcagagcttctcccctcttatcccctcccctgcctgcattccactcagcttctttatgatgtataaagatgaaactgaccccagtcttcagcctgaagagtgccttccattgggcttccacatttgggaaggttcccgctgagatgggacagaagtgtctcagcagtctctcagttcctgcgtaagttcagaaccaactcaaatcatgctctctgcagtggaatctccccaccctgggcgcggagagagtgagcactcggtgcctttttggataaaccaggtaaagaagaaaacaaattactttttagtacactcctttattcctcattccctccgcagcctcctatgacttctgatttcttgtctgaacttcaggaacagcacctctctctgtgtcttcctcatctcactcctatatggtgtttcattctctttatggtgttatcacatttatttatttatttttgagatggtgtctcactctgtcacctaggtaggaatatcgtggcgcgatcttggctcaccgtaacctccgcctttcaggctcaagtaattctcatgtctcagcctcctgagtacctgggaccacagtcacaagccaccaggcctagctaattttttgtatttttagtagagatggggtttcaccatgttggccaggctggtcttgaactcctggccccaagtgatccacctgccttggcctcccaaagtgctgggattacaggcatgagccaccgcacccagcctgttatcacatttattatcttacattttcacacaatatctctaaaatgtgccacagatatttttctctattttttattagagcgttcacgtttatatcacgcaccatttaatttgaccctcacagcagctatgagaagttttggggcatgagcattaatatctccattgtacagatgaagacacacacaggaagagtaagtgattttctcagaaagtataagatgttcaagaacctgttcatcttgttgctaatgtactttactcttcttctcactatggatgatgcaaataaggctcaaaaggaagatatgacttatccaacgtcctaaagtcaatgatggtataaatggggctggaattaatatctctcgattctcaattcagtgttctttgtatcccactaaggaatccttctccattctctaacagaccattggctatctgtctacccaactcatttcctatgtcttcaaactcttaagcacacgtcaatcagcatttgacagagggtcccaaaggtgaatgcctgaggcatatggaaagctcatcaggaattattattttaaatttaaaatggataaaacaagcactggcaagaaatccatcaatctgctagcaatgactgtgcaaatgactgggtataggtattagaggtgtaccgcaatatctctaatactgttacccagtcatttgtactgttattgttagcagattgagaaaagtgttttcatttttctgtttctatgttttcaaaattttcttcagtgagatttttaacttttataatggaaaataaacattacaaagtggaaaaaaatgttttgtgccacaggtttgggatgtgtttgtgcagctgtgtgcatgggagtggctgttgccacattgtgttaaatgggatggaggctgggtagggcaggaactgtgctccagtcttctccaaggacaggtcattgtgtcattcactggttcccattcctcccctaaagccctggctgatgattttcgcacgctttacttaataacttcctccctacctggagcccggtggaatccacaaagccataagcacacaccagcctggtaggttggggcaggtgggaaggagctctgggaggctggggcatcagaacttcaccctctctggtcagagctgtgggctcctgagcttctccctctgcctgctgtggacttatgtaacacattcacaggacttcattttccagtagattgaaagcaaagccgctgttgattttctccaaaatgatctatttggaagtgcaattgcctggaattacatggtggcgcgagaggttagaccttgctgtaaataactttcctctcagccacacaggggctcagctggaagcagtgtctgggctttagatgacggtgtttggggtgtgtgtgtgtgtgtgtgagtgtgaatacatgtgtgcatggtcttggggcctttgctcaccttgctaccacttcttctacctttggagctttgcatcagaataaggaatgagggcagagatggggaaggatggggttgtgcttgtggtttcttttatcagctggtttatagggcctgtctctggccacctcttccccttattgctgcagggtccttgagtcatgtgaggttgagtaactcaagcacagagtgtggagtggcacaaagaacaagcttaagaattggacgtttctgagttatagcaccacatgtgcccaattacaacatacgggaccttagacaattgcttacatctatgacctcctgtgtctttatacattaaagcaaacaaacctaaaccaaacaactggtataaggtgtgggagttgagagtacctacatttcagtattgttgcaagagttaaaggaagtaatgctggagaaatcacactgcacagtgtctgacacttggtatgtgttctgtaaatttagttccattctgtgccctgccttgcctttcatgacagattgaaattaaaagcaaaagcaatgggcttggaaccaggatggcctaatccaaagttgtgaaacatgcaaagtctggggtgtttcacttctttctatactcccttcccgtatagatagccatagcatacatacatgattcccccaaagaaagactgtaataaacgaactctcactgcagcagatgggacttaatgctgtctgctcctggtgggcatttgtattttaagagtcctgcgtaggcacgtagaggacaatgtttaacccaaagatggcagcattttatgcaggatggcatttagatggcagagctatttttagattagaaagtcttacatttactctggccattcttcagaccagccttatttgcaggcgttagaatgggattatgtgctagatcaagtggacatttttctcaaaactcacctagtgttgtccttttcacatttccccatgaaatttagaaaataatagaatcttatcaaatatggactacatcctcaggagaagacttccagacagttctggagaaggcatctagccgcccacctacctaacattttttggaatcctacactgtaatataataaatatagctgacatttatgaaatattttgctaaatttttatgtgcataatctgagttaattcttactacttccggtggtactgatattatgatgccattattatagcatattggccaagagcaaagatgctggagccaggttacttggctcaagtctcagctcaccagtcactagtagtgtgccctaaggcaagctgattctctgtggcttgatcttcttatatttaaaggaggaatataatagtactacttcataaggctgtttggggcattaagtgattcaatgtacataaagtgcttagaagaatgtctggctattattatcaccattaaacatctgagaaaattgtggatgaggggaagggaagtgattttcccagtgacacccagatggtgacagatccaggtcaagatttcatgccttaggactcccagcctagtgcttttttcttggtatgaggaatatgtggaggatctttaatttttcccacattattatctctcaaggcagctgtcagtcataagtaacagcatttcagaatggctgaaaatctagatgagaacaattgaaaaggtgagagcttgtttaattaaactagttcctgaaagcatgtaaaaagaagttttttcataaagtggtgccaatttgggtgcccaccccagcttggcagttgcagcttaagcactagttagtgggcttattaatcaatggcatcagagccaacatccaggctacagctagccttctagagaggtggtgctgccaggtgcaatcccaagatgagagtcaacttgtatgataagcataggtcaagctctgagttttcattagaaaaaaaataagtggctacttcataaaatatgttaattaaccattgatggagttgggatagaatgcgaaagttacattttctttagaaagtataaaaaccctttagagtttttatttcctaaagtgacccagaacaagccttcaatagaccaagtccaataatgcctcatgtgtttcagagggagagggtgggccagatgaggagggtggtcaccaggagttctcctttgtcctcctcccatttctcttgacctctcttgtcataatggctacagttccactgttagggatgtattattttgggcattgatagtgtttaaagagaaatttaatttccaacatctccaagagacaacaaaattatatagcatcttatatggaactctcttcctccctgttcagatgcagcagccaactaggaccatgcggccaactaagaactggaaaataaggcaaggtgccttgggaggagaaagggtggatgatatatgccgattgaccattttgctaaagcccaggtctactttatgccattttgctctgcaaagtgctgctggaagaagttctgtttggaattaagttagaacagggagctctgatccaacataagagagcatcccactcaaccaagataattaagagtttgtcctttcttcattcctttttccagcataagaaagagcatcctacttgttttggattgaattttatcctctcaaaagatgttgaaattctaactcccagaacttgtaaatgtgaccttatttgggtctttgtagatgatcgagttaacgtgaggtcattagggtgggccctaatccaatgagtatgttctcataaaaaggggacatttggacacagaaacagacacatatacacagggagaatgccatgtgaacatgaaggcagagatccaagtgatacatctacaagccaaagattgccagcaaatgaccagaaactaaaaaagaggcatgaaacagactctcccttagagtcctcggaaataaccagctctgaaaacacttgatcacagtcttttagtctccagaactgcgagacaatgaatttctgttgtttatatcacctgctttgtcgtactttgttgccctaaaaaactaatacaccactgaaccaagataattaagagcttatgtcctctcctttccttctttcagtaaatattagatgagagtctactgtgtgccaggcacaataccagatcctgagaacaatatcttagataagatctttgcttttaaggagttcatagactatcagggatacggataagtaagcaggccattactggctgtatgataggtatttcatgtcttttttcccctctagaccactagctctcaaccttcaccatactctagcttctcctgataacttaaaaaaaaaaacctatgtccaagccccattcccaggcattttgatttaggtaccctgtggtgggaacaaggctttggtattttatgaatcttcctaagaaatcccaaaaggctgttattgatgaaaaccactgttttcaaatatacccatcatcagggccccagtccacactaataaagttggaatggtaatgatattttttagaaagcttcccaggtgattctaatgtgtagccaggtttgagaactgctgtctctcctgagaggtagggatttggtctgtctcatttaatgctgtggcctctctacagtgtctgtcacagaatagacagtcaataaataattgttgagtcaggatctatgatgagaaaaacataaggtgctatggtgcatagaagatgagtgctcagggcagtcattagagaactgagacctgaaagatgagttgacttatccaggcaaggagggaagagaagagtgtgtctggcagagggaacaggatatgtatagagccaaggagctggctgtaacttggcatagctggagcaaaatctatgggtggtgaggggtaagactggaaagcggagcaaggactgggtcatgaagagccttgcaagccacgaggagtttggattctgccataggcttgtttgtgttgtccaggggcatagccatgaactctcaaggctgatttttgtttccttggccttgatgctcacccaggtcgagagtagtatcttgcactttttctctttgaagacaaaagcccaaggagggtgtggcattttgatgcccagggctgtaggcccatctcataagaggagcattgccgtctttctggagagaccatcaagtgtcgcaactgcactgcaccccctacatgggaccttccatcaccaggacttgggagttagattccccagccctccttctatacttccacatcttgggtggaccctgggggagcttccacatccctctttacacatccttcccattcctttcagtccagttttacctggacacacatgctaaggatggagagggaggagaagactcagtgtgatattccccagatggtccccttagggagagctcctgggcagggcaggttgatctgtgcaggaggaacctaaccctccatcccaggggcttgcgcatatatccgctgggtgcttgcttgtctgagccgtgctgttggcagcagtgcccgatttagtactctgcagacttcattaacagcctgcctgttccactccgagttcttaatgaagatgttaaataaaatgtgatgttagtattgccatttgtacagcacttcatatttaccaagcacctttagaacgtttttattcttttccaagtgatagccccaagaagtcgattagtactgctgccccattctacagagaggcaggcccttgggagttcattgatctgttgaaagccaggtagccagccaccaccccaccttctatcaccagtgggcattactcaccctcttttgcccagaactcaatttgttgagctgctgtagctcctcagggcccaaggacatctcacattcctccctccaaattccagactttgctctctaaatattattcctcttcatcattcttacaatgttgtgttttcagtttgggaaagccttagtcttctcttggtcaatttgaatgaatttgcaagtgaaatatcctgatggacatcaaatgtctccctgaccatctaaacacacagcacgcctcagggcccctgttgtccatcctgcctctttccaaagcctgtcaatggcactgtgtttgtgtctggcacgatctgtcttctgtaaacagtcgcaggacaaacagcactgttgtcttcctaaatatgacagtcgacacccccctacgacagtttttacttgtgaaaccataaatcagaggctccaagtggcagcatctctaaagaactgaaagaggaagtaaaccttgtaaagaaaagtacaaaaagcggctcaggtttgcttctctgagccttgttggagcagttgaataaggcttattaataggtttacttagctctctgtgccttagttttctcatatgttaaatggagctattaatggaaacacaggtatgtaaagggttttctgctttaatgacataagcattttgggagggacttcttgcaacactatttttgacttcacacttttaaaaacctatcactaactttctttttctagcgtactatgctgtcttcatgttgccttctttgcgtgtacttcatttctttttctttcttcatccggctttctcttaccttcttatcatctgtcattgcattcatttattccttcttccactgtcctaaatctcatcaccttcttattctgttccttatcctagcccatgggagggtcccctctgctattactgactggcttatcccacaggattctgccttttctccccctacaggctctgcaggatttctttccctttctctctctctttctctctttctttctttctttctttctttctttctttctttctttctttctttctttctttttctctttctttctttctttctttccttctttcgttcgttcattcctccttccttccttccttcctctctccctcccttcctcccttcccttcccttccttgcttccttccttcttccttctcctccttctcctcttcttctttctcttcctcctcctcatctcccttccctcccccatcccctctcccccgccacctcctctttctcctcccactctgtggtccaggctggagtgcggtggttcaatctcacctcactgcaacctctgtctcctgggttcaagtgatcctcccacattggcctcccaagtagctggaattacaagtgcacaccaccacactcagctaattgttgtatttttagtagagactgggttttgccatgttggccaggctggtctcgaactcctggtgatttgcccaccttggccacccaaagtgctgggattataggcatgagccaccacgcccagccaggattacttcttgatggaggatttgtgatgtggtgtgggagtacagagcgaggatgatggtggaaagatgcaaggccccctcacttcgttattaggtgatagaggagagggtgacagtgagatagtaaatagctgaggggattctgagttctttgactcagggagctaccttctggtccaggatcaggtagtactgagggttacaaaacaggtcaaaatggcctggcaacacattgtagttcttcaatggaaagaacattgcactgagaattaggattgttaagtcagaaactgtgaagggtctgagactgcagcctacttgcaagctaacaagttaatctgccacaggtagatattatatatatgtatatggtgtatacagatatatatgtgtgtatagatatatctgtatatgtgcatacacacgtacccacactgctgtcagggtacataatgagagaagatacaaactctagatcaaacacaaagatcattgattacttatggcaaatacagcaatcaaggtgatctcttgcattagttctctgaatcctgatgcccatgggtgatgtggtaagggccagatggtagttgcacatatagtggagcctgttaagcaggagacaccccccgctccagtttagaaaattctctgaccttatctagggctgctggtgacctgctcatactcttccctgcagagagagaagaccttaactttactctagaatatgagcaaatcttcagagaaaggagggagacctaactatcctggaatgtctctggggaaggagacagtctctatctttgttatactggtcaggaaacaaatctgccttctgacctagagagagacactctatttcatttccaagaatttttactatgcaaccaacccagaaaaaattgtcagtagagccctttgctcagaggactcaaactgtgcagaaatgtgagatattcacagagaattgtcttccaacagggactcttaggtgtgaagtgaggggcttagacaacattagagacttgaaaaatgtggaatgtgtgtaccaccactctccaaatctatgcccaaggcagccatcactaattaattggggttttttggtgcaaaaccctaggcagtctgtactatactgattattacctgagtcccctctagctgtgtgaaatcatattcttcacgtttcctcctgtgttccatcttttctacttttgtgaatctgtgtatctatttatatctttatctgtctctaagttggggaaaaggagaacatctcttctgaggcaattttgtggtttaagattttcgtacaaagcaagttcttaatcctaccaaataacattctcaatttagtctttaatccatgagaactgtagctattaacttagagaggcttcccttgcaaacagggattaatagaagaataggtgcctgttgttatatctccttctcaccattggctatgaaagtattctccaaattcctctagagtgatacattggagccatctaactaaggagaagactttaaaagaaatatggcgcaggtgaacatttgcttggagaggggaatcctacatcagaatagatacagtctgagactccttccaactctgagattcgaccaatgatgccacctgggcacttggaagatgtccctttacctttgagtcaatttggactctactcccagcccaagtaatcttttccttcttgtgttctatacttcaaattctgcgtttattcagtgggtagatgtggacttacatagctaacatactggggtttctactgaagacctggttatattttattgccagccactgaaatgaaaggaatcaagagaataatgggaaaagtatatgaactgtgagtagggcatcaaaagatagaggatgctgattagctaagtgaccttggatgcattacctagcctcctcgtgcctcaggtacctttcttgaaaatgaagaagttaaggcctgcctggctgtctatctcatggagatattggcagagcaaatgaggtcatgttcagtgtatgaggtgcccagaaaagagatgttggttgaatgcaaagctggcttttgctgctctgaatctcatcagcctctcgtcctgctccaacccatggaaggtcttccctctgctgtttctgactgggtcatcccacaggattctgccctttctccccagcccctgtaggactatgtcttataagggcctgatgggggacttgtggtgcagtgtgggacatacaaagtgatggtggaaaaacccagtgtcccctcaattttttattgggtgatggagtgggatgatggtgagattgtgaatagctgagaagatcttgtttttttgactcaggaagtgtaagcatacaaaaaaacaaactcactttctcgtactatatattcacaacacagtacttctgtgacccctggccgtcaaaatgtgtgaggatttcttcccaccaagcaattctccaatagacaccagctgggtggcctctaattaaatcagattctgacactgtctacctggagatagtgtccagtcctacaggttaagggctcagtcccacaagacggtcctccacttcagatgtcagttacaagtagtaggttgccaactgtgcttctgaccaactggctataaatcggggattcccacaatcccctccccagatttgattgatttgctagagaaactcacagaacttaggggaacgctttatttacatctacccatttattataaaggatattacaaagaatacttatcaacagccagatgaaagagatgcagagtgggaggtaggtggggaggggtttggcgcttccatgccctctccagcacaccaccctccaggaacctcgacatgtccagctgtctggaagatctctgaaccctgtcttttggggtttttgtggaggcttcattacataggcataattgattacatcattgccattggggatcaactcaatctttagcccctctctgtttcctgcaggttgggggctggatagagctgaaagttccaaacctctaatcatgccttagtttttctggcccccatctaggagctatggtggagtccccagccactagtcatttcattggcatataaaagacactatggcgattccaaggattttaggagctgtatgccagaaatggcattttgggagggggtataggaaaatgttggggtggagagtgaggagttggcaaagaccaacaaagaccaaatatgtttttcacactgtcacagggggctactttctcgtcaggagcaggtggcactaagagatacagaacagataaaaatgaggctggctatgtacacagatgaagtataatgaaaaaggttcatggattaggtctgagattctatccctgttgggtcaataattagttggtatgtgactaatgtattgggaagatgcccggtggtctatgatattgggattttttttttctttttgattctttgggcctctgaagataattcagcagtttaccagaggagtacccattctgcctgctccttccctctctaacttcctttctccctccctccacaaatatttatttgtaccttgtttgtaactgaagataagcacctctgaaatcaggcctgttggcatatgtctaaatactctttaactgagagacatatattcaaagaaacgtttttatatgtccataaactgacacatagattgtcaaatccctaataacaaggttcaaattagaatcctgacactaatgttttcaaatgttctaatacaggtcaccgtttttcctggtacaactcttgtgagtcttatgtgtgtgcatgtgttcgcatgcaactgtgtgagatgctttgttaattaacattgtgaagctaagtgctcagtgaaaaaagtactagagaattgcatattgtccttacagaattgtttgtaaatacaatcaagtaaaagctgtattgaaagaggtaggccttgttcagagccatgttactaatctcaagtctaggggtttgctctgagtgtcttggtgtcttggtggccacatggatgttcctttactctgcttattttcaacacaagaaaggttcttgcaaagatgccttggatgaaaaattctgctgccatggctggtatgcaactcattttgcatggatgttctctcggttctaacctagtttgtgttcaggtaattctggtaatgggacatttgcctctcccctgggggaccatttttagtgtctgtccatccaaccagttagtcagagaaaagagccctgatgtaagtagagaaagaggtatttgtagaactgtgggaaaaagaaaaacataacacactgacctgttttaagagtgcagggtgggttcaaggcttttttaaatttggtttcccaagatgttggggtcactataagcttcgagaatggctgaggtccaaatcctaaaaattactttcatctcagaaaatttgattagcaatcagaataattgaagtgtacctttccagacactatttcctaaataaaatgtatgcataagtgaagtcagacctgatttaagatgaatctttcttccattgagcaggcagtgctttggggataaagggaactggttcccaactccagctttgcattgaactgctgtgtgatctttaaatttcctcctaacaaaatgaggagagtaatactttccccatgggcttgaatgagagataaatgaggtgaagccccaagcacaatgcctgttgcagtgtgttcagcacatggtcatttgctttccttttctaggaaggaagcccggcttcctggtcttctgctgagcttaccctgggttcccagaggctcctttggatgccttgatccatggatatcttctaagatggtcatgataatgtcagtcttcaaagtagctgctttccctcctctgtactgcagagaccaggcacatacagaggccgaagggtggctctgtctcctagggtggctgtcaccaggtgccacatcattctgtgtttatgggtttgctctgataagcagatgaggggggtgctcatccattttttaaattcaagacattcaagttcaacgtatgagacaccaggagtaattgtactatgaactgacataaactgcaatgaggaaagaccttctctcttcccctgtcttagattgcacgccaggatgtgataattaaagcatctgtctctctccagctccccttatcagacatcttaatttatttacttgttaaaaactaagaggagaattcatgctttgttggttttcctctttattctactttcattgttacatattaagtgatctcttggcaaaacgaatacataacatagctataattaaatataattctatttggtatggtgtttccctttcaaccattggcagttcttctaatgacaatgaccttgtaatttaaaacatatcctaggggcatctgtttttattctggactactctgacacattggttgaggaatgacaataacaatggcaggaattgggtacaagtgcagttttgttacatgtgtatattacatagtagtgaggtctgggcttttagtgtatccatcacctgaacagtgtacactgtgcccagtaggtaatttttatccctcatcccctcccattctcccaccttttggagtctctaatgtctttattctactcggtacacccacgtgtactcattgttaagctcccacttgtaagtgagacatgctgtatttgactttctgtttctgaaatagttcacttaggataaatggtctccagtgccatctatattgctgtaaaagacatgatttcatttttttatgtctgagtaatatttcatagtgtgtgtatacatatatgtatacatggtgtgtgtgtgtatatatgtatgtatatctcaaattttcctgatccagtcaccagttgatggacacttaggttgattctatgactttaactttgctattgtgaatagtggctgcaataaacatatgagtgccagtgtctttttaatataatgatttcttctcctttgggtagatacccagtagtgggactgttgaatcgaatggtaattctatctttagttctttgagaaatctccatactattttccgtagaggttgtattaatttacattcctacagtgtataagcattccctttcctccataccttgttgttttttttgactttttaataataaaatatgtttttctttctttcttccatgatggtgcacacataatagattatcaatttactcttacatattaattatattaaagatacagatgcatactagatgcaacacagaagaaagatgccttgtttctggccatagatatgacagagagatcaataaaggccacagaattctcttcctgtttattcctgtggttgttgttgggattttttttagatatagcaagtactcagcaaatttttgctgaatacatttacttagaacaaagggacactggcctcctccagccagccacatattattttatatatattattatgcaaaacacagttgttcagtattgcccctttgcaagatgctccttgacctttatctaagggaattaactgctattattattactcattcttttttatgctgcctatttatatattttttaaacttgaaaaggcgagttttatttttatttatttaattaattaattttttttttttttgaggcagagtctggctctgttccccaggctggagtgcaatggtatgatctcagctcgctgcagcctctgcctcctgggttcaagcgattctccagcttcagcctcccgagtagctgggcctacaggcacccgccaccatgtccagctaattttttttgtatttttagtagagactgggtttcaccgtgttggccagactggtctcaaactcttgacctcaggtgatccgcctgtctcggccttccaaagtgctgggattataggcgttagccactgcgcctagctgaaaaggagagtttttgatgaagcacaaatgtgactagacagtaagggaggaggctgttgggatgactgagaaaagaaataaagagtgtcttagaatcatataggtgagagaattcagaagtcattactgtatacccattgaagggattagattctctgaaggcttaaactagacagtctgacttaatctctctcttaaaggaaaagagttgtatttttgttcttcatgcttttaaaattatacaagaaaaaataaaagcaaaatttataaaagcaatttgtatacattgtaaaaatattcaaatatttacaaaacagcatgaagagtaaaattatctcctctgagttccattctctaaggataaaactgtaaaatgcttcaattcttggctcttctgtttactaccaggattctaacatactttcttgttttataaaatttagacagtagattctgactttttgctatgagagtttagggccatatacgtaaatgctatcttccactcatcattcctcctccgaattctcagtcgtattcttacttatccattatcaaggtatattaacattcacattctgttccctaaatgtaattagattttcacatgctttatagttgattctaaagagtttgtttggatagaatgcctactattcattttttcattcatttgtttatttcattcaacccacactgagagactattttgtgccaggtatgagcctatgtgcaaagtatgtgcaagtgttcacagaattgtgtgtaagacaattgaatgagttttgggcaggagaagatactagatgcatatctcaattctatttctaaagatgtattaaaagaaaatttagatgaaaagggttacggagaaggacactatcatacttttagagaaaaagcaccctggaaattgtttagatacctaaatattgtcaagtattaaataaattatggaaaccagatggattggaatcagagccattaaaaattaaaattttgagaactattaaatgatgtgataaaatgtcataatctagcaatttaataaaataagaaactggatatgaaactagatctataatattatcccagttctgtaaaattttaaaaagatgatatgggaaagaaatatcacaagtgatgacagagatttaaggttttttgtttgtttgtttgtttgttttttgtttttgttttgagacagaatcttgctctgtcgccaggctggagtgcagtggcgcgatctcggctcgctgcaacctctgcctcccaggttcaaacagttctcctgcctcactctcccgagtagctgggacaggcatgcaccaccatgcccggctaatttttgtatttttagtagagatggggtttcaccgtgttggccaagatggtctcaatctcttgacctcgtgatctgcccgcctcggcttcccaaagtgctgggattacaggcgtgagccaccgcgcccggcctaaggtatttttttaaatttttatttatttattttttgagatggagtcttgctctgtgacccagactggagtgcagtgacgcgatctcggctcactgcaaactccacctcttgggttcatgccgttctcctgcctcagcctcccgagtagctgggactacagatgtccaccaccacgcccggctaattttttttgtatttttagtagagacggggtttctccgtgttagccaggttggtctagatctcctgacctcgtgatctgcccacctcagcctcccaaagtgctgggaaggtttcttcctttatactcactttcaatgaggaagtgttatcctaactacaaaacaaacagacaaacaacaacaacaacaaacctattgtcttcaaaaaaataaaaagtaacaatagaatcattgccttcaaggacaagattctcaatctggtgaaagagacattttaagaagttctcataatgtaaaatggaataaaatcagtgtctgagtgtctgtacaaagggataaggatggagttttgataggggtctgggcatcagaaaggacataacaggttgcatcatgaagactgagtagtatttctatggacagaggagaacattcctaggcgtgaagggatggaaatgaatgttgagaagtgagctatctgaaattgctggactagagtgtgggctaaaagatgtagaaaagaaagtggtttaatggcttgtggagaaccttggatgctttgctgaagaattagaatttaattgaaaggccatagggagctatggagaaatttttaaagagaggggtggacttgacctgtattttcagatgcaaagtaaagagagcaacctttggcaccagacagacctggagtcaaaatcccagctctgccagttccttaggataggttcttagacaaatgagttaactcttctctatttccttatccattaattgggggcagtgatttcaactttacggtgtgaacatgaggatagaacaacttaatacagagtttcaatatcatgaatgatgaataggtcttttttaaaggtaagaaataatacctggtgatgaaataatctgtacaacaatcccccatgacacaagtttacctgtgtaacaaacctgcacatgtacccctgcacttaaaagttaaaaaaaagaaaatatttggatccacctatgacctataagctctctctttgagttgttctgcctttccagactgaagtaatgtatgtctcacatgtattgattgatgtcttctgtctccctaaaatgtataaaaccatgttgtaccctgaacacctgggtcacatgttctcaggacctctcacgactgtgcctcatgccatggtcactcacatttggctcagaataaatatctttaattaaaaaagaaatatttgcaggatctcaccccctagtctgtgttaaattgtttctattataatgttaaatatttacaactatatttgttataaatttctcaagtttcgtgctctgctacaggtataaaaccaaaacgagtttaaacattataaacaacacaagcacaataaaattaaatgaagcagtattaatttaatagacccatttgtaatcaatatgaaaataaatctttgtggacgatgtgaatatagtactaactgctacagcccaggttattaaagtttggcctttcccatactctgtgtgttatgttgactcagtctttccccacttttctctactccaacttattgtttatgcagtgaacagtggtattatttaaactttgcttagcatgaacacatcttctatgtatcaggtccacctctcttcctcactggcccatcactattaacatctcaccactgtagacatgcatgcaagtgcaagcattgaaactgcatagcaggactcaattatgtagtggttatctagatgattttaaaaatgttatcagtatgaaaatttagatcacacagacatacccacacagacacacatacacacacaccacacaccacagccctcttatggttctacacctcctatttgtaaatacatatatcctagaagtcttattattattgttttgttgttgttgttgttgttttgagatggaggctcgttctgtcgcacaggctggagcgcagtggcacgatcttggctcactgcaacctccgcctcccaggttcaagcaattctcctgcctcagcctcctgagtagctgcgattacaggggcccgccaccatgcctggctaatttttgtatttttagtagaggtgggatttcaccaagttgggtcttattattattgttaatggcagctttattattgttagtgatcttggttaggtagatgtatcagttggctattgctgtgtcataaagcaccccaaaattccgtagtttaaatcaaccagccatttattatttctcatgagtattaggttggctgtacacacctgctgatatggtttgggggcataatggggctgtctctcatctttggtcagttgcacgtgggcttgttggctttgctgatgtggctgagcttcctcacatctttgaagccttgtctgagatggtttggctttgctccatgtgttttcttcacctccagcaagttagcagaggcttgtttttagggtagtctggacacattcttatgctgatcacagagaagcagggaaagaaatggataagtgcaaggtctctttaggcctcatgttagagctggcagactaccacttctgtggcattctattgattgaaacaagtcacaaggccaatccagattcatcagctggagacatagactctatagtctatttctagatgagagaagctacaaactcaaaattcaaagaatatggttatacgtatgtgtgaagaattggaggcacttttgcaatcaatccagtagagcagttaagaacattgaaatctattaggaagtgacatagatcttcttggtgagagggatcctgccttaggaaagaatgaatgtgtgaggtgctctgccagtctttggtgtgggagtgagggagagggaagagtcaaagatggctttgaggaacctgggcttgggtgactgagaagatggtaaagctactgagatgagatggtcagcaggaaaagtaggtttatattagggggcctggggcatgggagaggtcaaagatggagggagaaaataagtttagagtttagcaaagtgggactcttcccacaaggagaaaccttctccacctagttacacaataaaatcgcctaaagagcttttaaaattgataattgagtctcatccaaggccaattaagcttaaatttctgggtagaaggcctggtattttttttaatattcacaggaaatctaatgtatggcaaaataggaatcattatctaaatcagtgttcttcttgtgcccatacgttagaatcacctggaagccttatgaaaaatactgatgcctgggcctcactaccaaagaatctatttagtgagtctgggatagggccttggcatctgtattaaaataaagtctgtctggatatatgtgatgtaatgtaatgcagccagagttgagaaccactgacctagatagttaattttcactgtgaataatcaatgttttcagggttgcaagccatggcaaaggggcactatgacaaagtctctttaagttcttggcaggtccagaattagcatgaaattgctgggtgccaactggggcatggggacaggagcagtcagaaggtgaattctatacacttcgaagacccaacctggatcaacacctggtgtttgaagcacaagggcttgttagtgctaatcctgcatcaagtagagatggtgggaaatcgccctgaaaagctctatagtgtataaaatgtcatgatgctattgaaacccctgttgtcccattcaaaccgagctttctttacagtagcacctgaaaaatacaacttccaccatttcctttgagaaggtaaattcagtctgagatctcagtatttgttttccttgattggaaagctaaaactgcctcttccttgattttgtcccgttagtctgagctttgaccttgttacatgttagataattccttgatatgcttgttgttaatgccttataaatatttgcagaccaattatctgtctataggcagccactgagtcaacaacagaatatctgggtttttttccatgttcataaatcattcttggcagaccttaatcatttgggtttttggctggcctctctgactttcttctagtttatttttatcctccataagcctcatctattttggagaaatatttaattgcataagagagaagttgactcctgttaggtatgacactgacaatcttccctgggttcagggtttcttcagagtggcatgagaatccctttggggatgggagaaggcttgtgaaaaggacatatttatgagtcccaccccagttctctgaggatgggactcaggcatctggaattttcacttctttaaagggtaggtgattcttatataaacagttttagagctattaccaaagttattgcttcaaatattatacttagaggagaagttggggcaatttcttttctcggtgggagaggctttgctccataatcctcgtcagtaatcaagagatacacctttccttaaagagtttccaaaaatgttctgcatgaggaatcaccatttcatgtcagtcttgtatatcagtggggctggttggttaatacatatggattgtattgtgttcatctgacattaagatataagctgaggcaaagtgaagagaggaggaagaatgaatacaatagataaatagtaagatagaaaagagaagagaaatggagatggggaggaaataaagaagagatatttgtgtaaatatggtttcatctatgacaatgtttagtatcacgcttttttacattttgaagcactttacagtataaaaaatccttttatatgcgatcctcacaactgtcctggggtactggaccaggtaagtgttaacatacccatttcacagatggaaaaattgagacttctgacagcaaccttccgaaggtcagatagctagtgtcaaaaccaaccctggaactcaggacttagttctaaagcaggaattttctgccaatcctaatctatactcagcctgggtaacctagacttgttcttgcttgtgtaatgacaaggccttcattctgaatgagtgctctgatgtgatttgatgtagagtggttctttggggagggacatggcactggcacactgaacagagtggacttggtatcctgaggaggtccttggaaattctcataaaaatcaacaagcttattgaaagagctcatgttacatcttataaacaaaataaaactggtacatgattcgtgagtgtcttcattcttctctttcttccctttcttctcttcaacacactcaacacacacacacacacacacacacacacacacacacacacacccccaagaaattcacctctggctctggaatctggagaaagttcaaagtcatgcagcaatgaccgtcagcatgattaggcctactggaatcaacaagataaattcagggcctgatcaccatcagacattttcttggtctaacctattgtggccaaaggaagggaagtctcactcaggtctgctccctctccttcatttacttactgagcaggctttttttgctttagggcatggttggtactgaccctcctgggactataataaaaactaacctgggtaccagggttgaatgttgatgagtttttttaccctcgttatttctcttgatcattacaacagcctggtgatataggtaatggtaatatccaggcataattacgataccattggtctaggcatacttgtataattctgtagatcagctacccccctagaaagtactaaggtaaatttatgcacagagagggtgaaacaatgcaaagggacactctattgctagttggggcttaggcccctcaaatactgaacaggattttggtgaactgggctgcaccacaaagagaagctgggtggacttgaaccaacctaaaagaaaagtcaaacctacctttctgattttggttaggaagggaaaccaaactctgcatccctgctgagaatccccgaaaaagaaagtggctgtaaaagatggaacctaagcctttccaagccagaattctgtgctttgtaggaaaagacaggcatcagaagagaaagcctcaaagagctttgaagagcaagatagcaagatctaggacacagcttactgtttgaggcctaagttcccctcagtgttggaaactcccactattatggccagatgaagtagttttgcctctttcttggtcactgtctttgggatgtggaggtggtgtgggggctggagggaaaatgtgatatcctggggatatgttttactgtgaggaacttaaggatcggggaagttaagtcacttactcaaccaaggtcatttgtttagtgtgtggggaagctcagatttgaactcttgaatcttggcaacaacatttagtaattttcccattttgctacctatcctctctaccaaacaccattttgttcttatgtggaaaattggttctaccctcctgggcttcctctggcaggagcagtgtcattaaaacattgaagagaacccaaagaatatatttttctccacttaatgcttgctcagggaagacatccacatccatgggagttgtctggctcacagtttaggaagtgtcatgcacatggaggtagtctgctagatgaggcttagatcacatgtctatttcatctcactgttcctccttaaaagttcagatgatacaaatggccacactgtcctctaaaagaagcgttggagtttattttgggaaaggggcctattttaagataaaggacaggggctccctattctgccactgtgctggcttgtctccactccacactcagcaaaaatggaatattctctaaacaataggtgactcagcctttgcaaagtctcaggtgaaatggatttagccagcaaagagagaaaatgtctttttttttttttttcatttttccctggtcctgtttgatgataattctcagtgctcagtgctcctttcatccaaagatctgtaattaattaagcctcacaactcccctggcaagtagagagaggtacaaggatgttcatttaaaaccaatcctgtttgatacagtaggactgttaccaaggctctttaaaagaaaaacctttctggccgggcgtggtggctcaagcctgtaatcccagcactttgggaggccgaggtgggtggatcatgaggtcaggagatcaagaccatcctggctaacatggtgaaacctcgtctctactaaaaatacaaaaaattagctgggcgtggtggcgggctcctgtagtcccagctactcgggaggctgaggcaggagaatggcgtgaacctgggaggtggagcttgcagtgagccaagatcacaccactgcactccagcctgggcaacagagcgagactctgtctcaaaaaaaaaaaaaaaaatgaaaaacctttcttttgtgaaacttctttttaatggactaaattaaaaaagaaagggaagaagtaactttatctgggatacctgctgagttatggccacagacagagtcctaagttaggagctctgatgtcattcttggattaaactaggtgtataagctactgctatgtagcaaatcaccatgaaacttagtggctttagacaataataaacatttattgttaatacagttactgtgaatcaggaattcaggagtggcttatctgggtggttctgccttgagatcatagtaaagatgatagcaagggctgcagtcatctgaaggcttgactggggccggaggatccacttctaagatggctcactcaaatggatggtgagttggtgctggctgttggtagaagactaattctgcatgtggacttctgcaaagggctgcttgaatgtcctaattatgaggcagatgctcccctattacaagggacccaaaagagcaaacgtgtaagtgtcagtgtcttttgttacctaccctgggatgtcacactgtcatttcctcaatgtcctgttgactacacaggttagctctcaacattatgggaggggcctacaacaagggcatgaatatcaggaagaagactcactggaggcctgcttggagcctggctactgtatgaagacatattaaacgtatgtccatctgtaatattagtggtcctctgaaaaaccagcttagaggactaattatcattcatctgataagaagagagagtaagagatagggaatggtgtaattaactttctggttatttgtagttttagaaaaaagagccaccattcttcatggttaagtgattaagcctatattggagtgtacataacaaggggtgatgctcccatttttaggagctggatagctgtcccagaccttatagcagatcactggctcctcattgttggtccatggaccaatgttatattaactgctaaaaggcatccctgaggcatttattaaaaatgtggataccagctttctactcttagggattctaagtctgtgcatttggaacccactgtgctggctcaacttatcaagttatgtggggtgagaattatgacttatggcagttatagtcatttgcttagcatctctccatgatctttttcttggtctcagaacaccaactaaaaataagttcctggttgctaagggcatgaatatcaggaaggaattgatagttgccaatgttgtttgcataccatattagttcaagaaagtgcagagagtagaaagttccctaccataagggctactagaaaggcagagaggggatagggttgctgaccaatagcaacagtttggaagattatcattatactgcatcaatatatgcaaggaactggtctaataccaggtacagaagtacttttgcatcctgcatacattttagtccagtggttctcaaatattagtatccagaagaatcacctggagagtgtttaaaagtacagatctttaggtctgcctctgggattctgattcagtgggtctagtgtaccccaggtggttttgatgtaagtgatctgggaccacactttgatatacactgttgtaggtacagcctaacttaattgcaaggtattgacttcatatctatttaatctccagtagcaagagtttaaccgatagagtgggtgacatataaggggtacatgaatgacagttgctaggtgaactgatgacatgcatgaggggtacagggagactggacaggtgtgaaaaagcattttattagcattatctttgtggatattcccctttcagatgataagctcttagaggtaggacctatatgctatttaattttgcaactcccgcagaggttagcatggtaagctgcttgcatcaggcttacaatagatgtgttaacacataggggcaagttcatctgaagtggccaggaattctgcctggttgggaattgattcatggtacccagagcatgttgcatgttgtgctgactgctttatgactttcgaagttgagtgactctaggttattgccaagctctcctctcacctcttccctctttctttcaagtatctcaggtggtattgatagtaaaacagtcttggcattaatgagtgtctgactggagagtgaaatgtaaataagagttgaatagagcacagccaaagcctacaaattaccgctgacaaataacagggcagacaaagagtatttcagccttaccaaacacctctgctacaatcagctaagaacacctgggaatgtcagggtggcagacacagagccaacaacatgatcaagaagaggacatttgatggcaaagagcaaagcagcaagttgcttgtgcattgcttagagaagaagaggaagaagaatgatagaactactggcttcactcaagaataatttattgaacttctactatgtgccagtacttattataggtactagagataataaggtataccaagtagacataaagcttatattttagcaaaagatatagataatggataagcaaatacttagtacatagtacaatgtcacatggtgattagtgtcagtaagaagaataaagcaagggaggggaatacacagtaaaaataaagtaaatataattcccaatgacattgctatatataataatttgacaaatccattaaactaatacttactgagtgcttactatgtgtcacacagtattgggcaatggagatacagtgataagacaagttttgtaatttcacagtgcctaatttttttaggccaggaaaaagactataaacaaagaaagacacataagaaacatatgagatagtgatttgtgctatctagagaattaaggagaactggtagagtgactgggaaggctgctttagtttggttgagggaattcctctccaaggaggtgatattaaattgaaatctgaatgacaaagaggagccagctatgcagaaagcatcacaggccaagtggggagggcacacgggtgaaggccctggacccagcagatctaggaatagaaaggccagtaaagctttataaaccatgaggggctggggtctggttagaataattaagaagagaaataattttttgtttttcatatatatgacctggggaacaaatataaatcctacaaaactatctttctttccatttaaatattgtctagttctttcatcagagacaggtgtaatatttaagtcaattgatttataatatgaatttcttcctgtaattagttctcttttccccagcacccctgagataattcaaaatgcagggcaagtgttattataataaaattttatgttagtataattaacaaaaataccatatagcaatatgccagtcattaagcgtgttgattcatgtagtaactgggaattcttagttaatatttgtctgcagatccatttatcttccataacaccttagatgaaatgtttctttttgggctcgtattcaagatcttggggtgatctttttctgtgtctagtttccatgcaatctgagctctgcagcagccagtggaaatgcccttagttgtcttcagtttctctttatgggtgctgcaatctctttaacccctgtccatacaggaactttgtacactctgctgtattctccatctagggttcacatatcacccaaattctcttctatgtctctgggaagggaagcaattctttttgcaggtcttcactattgtctttttcttttttccattgctttttctgtgctgtctggagaatcactttccataccattgggtcttcttttccccagttaatataccagagcctttctgctcattcattctctacatttcatgcctctctgaagtattaatacctttctctttacactggttacagatgtatatgcaaagatcaagtggatagattgtgtttgctgagaaactttagtgttgaaaatgcaatgcaaatctttaatgtaagtttactgtatatttgagtgtattgtatatttattctccaatataaatttagcaactttcacattatgaatcactaagccttatgtttctccaaagaagggagcatgacttctcaaaatacaatattgttttagaatgaaaatttgtttcatgaccaatgcaaatcagttctgaaattccaaactccctcagccttgaataactttaaaatgcaaatgctacccataaggaacaaatgtcttttcaattattaaaattgaatttcaagatttggtttcttatgataaaaatgtttgaatatatctgaaaaatctttcttaaatcctactattaattaaaaaggataaaagcagaaagttgcaggcaataacaagaacaaagattgagttacaaaaactagaatgtgtttaattttcatagaagttctaaggcattacattagcaccattagggtagggaaacaggcttatgtctctctctgtctcacacacacacacgcacacacatacacaggctaacgggaaaggacagactcatgtacacacacatacacgcacacatagttgagccaatatgctttatgatctgtgaaaattaggctcaacatagtgaccgaattgagagacaggatgttgatcatagttttgctttctaacttgaagaatatagctgagaagccagggtttaatggttttgatattctggaaaataggtatcatgatagtcaaacgtttctgctctgttgggatacaacagaagtatgatgtctgtccttaggaagtttactagtgatttggggggaaaatggctttatattatacaactcaaacagtatgagccagtatacgcttaagcactagatactgcagtgcacagagacaagtagttatgagaatcaagagaaaggaacattattaatactgtgtggggccaacatggaatgcttcatggaggagaagaagtttaacttaatttggaggaaaatacagaatttagcatcattttctctttaatgatagcaagtcatttttattaataatattgattatctctctgttgactcacagattagaggatggaaaagcatgacaaacccacagggtaactatgttttaaaggtttttaaaaaagaagtcagaaaaaaaagagaaagcctttctaagagcctagtcttggggaaaatgtaggagatgcagaagagaattaatggctaatgcttatcattttgtacaaaataaccttgacacaaatggggcaatttaaagaagggtaagtgactcccagcccactcaccaaggttgatggtggaaataatcatggggttgagggcagactggaaaaagaagaccgagggtaggtagctttctcttctacattatgtgtgtttctgatctagaggtaggaagctcatagctgaaggagcattttagaaactcagcctcttccactttccaatcactttaggtacttaacttgatctagctgcaagttagatgtgtctcttttttttccatcctccttcaagctctatgcagagatgtgttagttgtcatatcaccaacgtccaagaagttatagtgaacaaaacacagttagagaactaggataattgtaaatattttttatagcaaaccaatgtgctacaatatgtaagttagggtgtgactatccctgtgcttcataagtgagaaaattattattgctctaagtcagttttccatcttggctacacattagaatcacctggcgaactttaaaaattaccaatgcccaggaccttcccccacctgctctcccaagaggcatagtgagtctgagaagtggcctgggcattggggtttctaaagctccccaggttattctaatgttctgcaaagttgagaaccactcctctaactgctgatataaacaaagtgcagctggagagtttgttaaaccacagactgttgaattccatcggcagagtttctgattcattagatctgggatgggaaccaagaatttgtatttctaacacatccttgggtgatgctgatactgctggttctggggaccacagtttaagaaacgttgatttaaactattgaggtcaagacaattcaggttgtacaaagtcagcatttcgtaaggtttgtccccagaacatacttattaaaatgcagattctgggcacctccctaaactcactgaattagaatgtccaggaatttgcaattttaaatgagctcttccagtttttcttttggacgctagtgaactatggtggaggttaatagttttatttcttatcttgctccaaatattattttatataagttgaatgtgtgaccctatgaaggtttttgtaattattttatgctatattttgtgtgtgtgtggaagaaaacctctatagattggattgcattaggtaccctgaggaatatcagtagtcaaatttggggaaataaggctgggcatggtggttcacgcctgtaatcccagcactttgggagagcagggagggcaaattacctgaggtcaggagtttaagaccagcctggccaacatggtgaatctctactaaaaaatacaaaaattagccaggcatgatggcagatgcctataatcccagctgctcaggaggctgaggcaggaagaattgcttgaacctgggaggcggaggttgcagtgagcagagatcacgccatggcactccagcctggatgatagagtgagaccctcaaagaaacaaacaaacaaaaaacccaaaaaagaaatttggagaaataagcttcgtcatggggcttatattataacaacagactcacctgtttatatagtggctgcaattctcattgcatctgagatgttcaagaggtaactttcaaaaccacacttggcacattcaacataattaggtaattgcacacagcacaggttgtataaaggttagaggagcatctttcaaattttagaggatattaaaattaccaggggtatttgttaaaagttagattcccaagtcagagctccagagagtcccagctctgggtggcatccaggaatctttatttaacaaaagtagattcttatacaatgggtccaggaatctcattttaagaaatagtggattggagaatatgaagtataaaaattgttttcacagttgacctgagttgctaataaacaatttgctatatatttactatttttttcacattttgtaagtcagtgtcctaatagctaggtataagtgtaggctaaaatggcaatgttcaggatacatcctttaagggtgtaatattattacatacatctgtctcctttctcatttacatattgtgcagctttttttgtccctttctatactattcccccttttattaaaaaatggagcagacacatgattaaaatgaggaccaggtcaagtttgcatttagctaagtattcttcccctttatttccctgtcttggccagcttactgtcattcctctttttccctttgttcttttgtctgtcttttcccctaccagtccatgttccatctttcctctacgttgtctctcctttgtgacctctttctgtggccatttcagtgggcatgaagggaaggggtggtcactgtaaaccttgccaatccatatttctctctccacagccaggtggtggtgtagaaagttagtaaagaataaaaacctacacaagtcttctattatattctggtgtgcaagtgtggggttaatagaactgaataaaatgatttttaactaaaactcagagtccacaggtaagagggagagaggtctggacaaaaattgtacaaaattttgttggtgaatgatagtctctgtaggggaacgctgtgcaaaatgagtcttaactgatttagaatatagctggacattcttatcaagttaactgtccactgttttgaatcacaggggctaggataggattatttctttttctttcatgtttcggatttccttctacctgcgaaaatattagctttcactcaagaatcctctcccaggcagaaagaaggaaagaaagtcttgctagaggagaaatcttattaaggctcatggtgattcaggagtgacagccggggctttttcaatggacttatctgctgtcacagagacccactatcctggaagagcccaggcaaagtctgagggttttgaccatcaaaatgaatgactgcaatatgttttgaattgcacagacaggaggagaagtgataggtattctttatggaaaatcacaaagagaaagagctagcaatcttcaagcctttttatcttcataccaaaaacaatatgaatactttctatggagaaaaattgtggcagcaacctgagctgaacataactacaaacagaaaggatatcccctcctacagccctcagagtcatctggcattttgcttatcctgcccctgaactcaagactcttttatattatagagttcttttaggaaatatttatttcttgaacttccccttattttttagggtatctccccatctttttgccccaagagcctgaatcacttgagcaagatataatatccatgtagataagatgataaagggattccttatatcaaggagtcaactaaaagttaatccctgtgaaacacagaaacccaccacaaatggtaaaatcccaagaaaaagttttgagttttgaccaaagagctaatttcatttcccacaagtgcaaaactttggatgtatttatatcagctgactactatatcttttctcaaactccaaagcccacatagctgatatactcttgtcaactgatattgtttccatgttacagatcaggaaacggaggctattcaaagttactgtatatgcgttgtctaagtgctatttgtatacttgtttatcactcctttgatctgccccattgaggtagacaatgattcttgctacttcttggctctcctatatacccagggctatcctgtctcataatagaagcttgataaatattgtcaaactagatcatatgctttgtttgagtcctcaaggggagacaatgaaatagctggggctagaccctcctctctctctcagacatcttgaaatgcagtcaggacgtagcggtgctgagcccattataagacctcaataaatacctgtcaatggcttgactgaaggactgattcaagactatcatattctttagtacttgtctcatgtacttcaacaaggactttagactaaactgatttgattggttatatttttagacttgttacttctgttttgacagaaagaatagacaatacgactacaagcatagtgaccttctggatttgttcctgtggataatcttaagataatttgaaggaagtttcttaactttttaaaggcacaggtgtcagaagtgacaggcttgataattagtcagcattaccccctcactccttttaatgttgtttctcacgctttgcattggttactagtcaatctgggttgcagttctgatttagatgtcaccgtactctgctttaaaggttattttggatctttgcctgtctttgatgtgttctagtacccatcttcctgtctccatccccagcatctgagaacacttctcatttccccactagattgtttttttaaatttttgagcatgctctgttttattttctgattatgaagggcatttctagtagtcctgggaagagtgagctcacaaaaagacagctagagaactagtgatcatgactattatcacatcaagactttggcttaagcaaaacagaacaacaaaaccccaaaaaaccccacaaaactgggaagtgcttagagccccttctacgtgactctgtctgcatctgcagtaggaaagtttacatttactgttaatctgctgttcaactttttgggaatgaattagcaactcttaaatttctctccatttcctatttctagtaattagctcagtgtcacagctaaggttttcttactgacttcagcatggagacttagcagttacggaaaggagaggctagagctttccaccaactgcatgtcactggtgactccaagagagaatccaacaaatcaactactaataatccttactatttaaaccgtgttcactattatccaataacttggctctcagttatatcttcttaagaattctaataaggcatttagtttatacaaaggaggagtctgatctatgcagtggacatgagagacaaccaaagttttgttcctctttccaatggcatagagaaaaaaataaaatttaggcagaattagaattcagaatgcctgggagttcctccagccttgggaaattccaggtgagaggggaggactctggagctttttaaaaagaccctagagttcattttacccaacaattttatttcataaatgagaaaactgaggcctagagaagtatggcttaccaaggttacaaactaaattatggcagttttagctcatggcttatgttagctagactgctggttcgatttttcagtggaagcctccttttgaagaagggcaagccattcatttttcagcataaaccaagggatgctcttacacacacacacacacacacacacacacacacacacacacacacacagagagagagagagagagagagcaaaaaaagaatagccatcataaagatacatttctgttctggattcaagaggcagaattattaatacaggtagactgccaggaatgcagaatgttaatgcagctgcggaataatacactagtgccacagagtttaataatagataatgacaaataatacagttggggaattgtgtaattcaataacagagtaaatgacaaggaaacacacacaccaatgaatggttctagtggggacgcttaggtgttttcaatttaacttacctctccagccctttggcctactacccttttgagaggcaggcaggacatgcagagatgtgcccagctggggtttttagtttgtgcagtgaagttgcaggtttcaggggctgagtcaggaagtatgaattgtgctcctgggcagttatcagctgatccctttaatgcatgtattactttcctccatgtcatgactggatagtttctttttttctgggggagagggggcctagaattgtcccaggttggccattctctcctattacccactctgtaaatcactgcatatgagggagtggtactggaacatggagcttgaagatgggaagagactgggagttggggtttgggtttagggtcataatgggaggtaaaaggtttagccacagctatggtttagtaagcataccagtgatctggtgtgtacttccctgtcctcagctgcattagagaaaggcagccgctgatcactgttagacctgtattctttctctaagagaatgggatatttccctctcattcttttaaaataagataaaaagcaaggggtggggaaattaattaatgtcagtaaatgaagcatgagacacttgtccggatatgataatgactgtgaattagtgcagaataaataaaatggtataaaaaatgaaccttgccagcacactcctttgggatgggctcagtcacccttataatgcattaactcttcccttgcctcatccttggtcctgtctatgttactgtgtcaaagctcccccactgcagagtctcaaggctacagtattatagcctgaggtgcccaaagggagccctggctccaggagagattgagccagctggtgactgcatactttataatgtaaatagaataacttcacatctatttattaataaaaccacactaaaaagaagcaattgtgtgtcccccggttgggagattcaagaaggcagacagaaagccactggaggaagaaaaagggataagttcctcaaaataagttgctccctttcccccagagccaaagtttacctttgtgctgctggtaagttatctacctcccctctctacttttctgtaagggccccaggctgtatgtcttttatatcgtcttcagatgactacaataaacacacactaattgggcacttcctgtgtccaagcactgtagaataaacagagagaaataaagcaatctccattttcaagttttctcctttaagggtgtggagtagtgcttgacatgtagtaaatgctcaacaaattgttgctattacatcagcattgtttcactgaatttaatccctatgaaattttcactgaagacaagtttgagagattcagagagcccttggccactttattttctttacttttgtttctttgctttccttttctccttcattttcttatctcttctatgtttcaaagttcttagattattggcaaagcaaatgcaaagaacatggttataataacctttgaatgttaacacttaagaaattatttgctattaacagaaactcaatgcagtgtagtcaccaaatatgaatcactgaattcagaaatgttattaattcacactacagtatgggcaggtagacaagtgtcggaatactagtttagagttgtttgatgacagcttatatctttttgtattctcatcagtggtgactatatttgcagagtgatttggaaataataacaaaagattgaatttgtaatgtttggtattttcttaaaatactctggaaccacaacaaagagagggctggatgaaaccatgtggacaattattgttgaagctgagcaataggcttatggtggtacttactatttttgtgagtgtttaaatactgctataataaggaaggctaaagtgttgagggatcctttgggaatgtaagcctggatgaatgacctcctggggcctacctttttcctgcccctccaagtccaagttgggaggtagatggtgaatgttttacattcctggtgtgactcaacataaccttttaaggacagtgttaacatgagatgcctcctgttcctttgggaggtctgtaatttttctcagaaggctaacttatagtccaggtatgtgtgcactctgcccattcagtctttgcctttggtttttctttgatctggaggatcataggaggcaagtgtggaaatacttcttcctggagacaatggcagaggagagtccgtgtatagaaattgatttgttaacccttgcgatggcctccctctcccaccctgggatggtggaagagatgccactgagagcctgggcttgtctggtgaaagagtgggcttaaggaaaaagcaacaacaggatcacaaatgagaccctaaatctggttttttccttgtcctcagtagcttattagagataactacatcacataagctctgtccatgactgtgaacttttatggttttgtctattagagggtgatgtcagaggctgttatcactggcattaatgatttatttgggcacaggtagacttataaaagtaggtgggggtattgattatagtcatgggccaatgagattctgtttcatttcctaaccaccaaacagatgtaaaggacttctgtgtgcagacctcaagattacacagcaaaggggcttccaaaggaatttacaatttgaatgagacctataagaatcaagaggtgcccaagagcagacgtaggcctgtatgtccccatatggttgagttttgataatccttcatttccagtcactgctatggtctggctgaccttctgaatgtacccagtattggctggctttagatctatgatatgagctatttttttactcattaaagtgtttaaatttctgtgcttagtttctcagatgacttttttttctgtgtggaatctggttgatatttttggagaataatttaaatcagttctaattccaccctgaagagctccttttgacacacaagtggctttgtgtcattgcaactctggaggaggccagggcaggcttcctgggtgctcagaacactggctgcccttggaattatggctttatctctgggggatagtacttcaagaaaaaatgccaaggaaatgtttgtcttagtgtatttttgtccattttgcctcaaaaaagatttgtcctgcccaggagcagtggctcacacctgtaatcccaacactttgggaagccaaggcaagtggatcacttgaggtcaggagttcaagaccagcctggccaacatggtgaaaccccgtctctactaaaaatacaaaattagccaggtgtggtggcatgcatctctagtcccagctactcaggaggctaaggcataagaatcgcttgaacccaggaggcagaggttgcagtgagctgagatcatgccaccacactccagcctgggccacaagagtgaaactccatctcataaataaataaataaataaataaataaataaataaataaataaataaagatagatttgtcctgaaacttaaagaataaagactcggtagacatggaatatattttttttcaaatttcaaaatgcaaaagagaatacaggtaaatacttgtatttacttcataaatgccctatttttcacagggtgtatcagtgtgctttgggctgccatagtaaaatagcacaggctggaggacttgaacaacagaaattcattttctcacagttctggaggctgtaagtctaagaccaaggtgccagcaggtttggtttctccaaaggccattctctttggcttacagatggccatctttttcctgtgtcctcacgtgacttttcccccatgtgtacatccctggtatttcttcattccaaatttcctcttgttataaggataccagtcacactggattagggctcactctaatgacctcattataacttaatcacctctttaaaaatcacctatctccaaatacagtcacattctgaggtcctgaaggttagggcttcaacctatgaatttgggtaggaggcagggacacaaatcaactcataacacaagatgaggaatattgttaaatgataaaaacaaaacacttgatccctatgatctaaagccctgctctgcaattctagagattgctttagaagtttgcatttaggtatagtcgtaacatcctagaaattaatttagaaagctgcttttacattaaaaatcaaaaaggtgagcaaaaagaatcatggctctgtaaattttcttttattttgatatttcagaggacattattactattactaaaatattgtgggtggggggaaggaaagttgggagtaggatgagaaagaatcaagtgttgagggaaatttttcatgtttgttggaggaaaagaaaagacatgaaaggaagaaagatgaaagaaagagggagatggagaaataaggcaaaagaagagaagaaggagaaagaaaggaggaggaggatgaagaagaagaaaggggagggggaggagaagggaggaggagataaaggaggagaggagaagaaatgaagagggaatgggaggggaaaggtggagtggggagtgaagaggagaagggggtggaggaaagagatgaggaaagggagaggtaaagaagagagagaaattagtgtaggtagcacttaccatggattgaaaaagagagttcacgcttttccctctcttaggaaactcccagctgcttctaagaaaataagagtgactacatcagagagatgcaaacaggaagagaaagtaaatggaggccctggagagggagagcttgggtattgaggtttggtgtggatagctgagaaccatccaacattaatgagcacaaatgtgtgcacaggctgaaaatgtctctccagggacgctgatgacttgagctttgtgtgtgccattggaaatcatgaatgagaaaataactgactcgctctctcagacaatctggtttatggacctgaagctcttatttgctgtcaggttgttcatctccacgcctctgtgagatattattgaaacagaacccagcactgtcctccttgccaaagtggttgacgttggccttaactttccccagttctgagacagggacagactggctaatgtaagtgtgccctgtggatgtgcaatttagagggaggaatgggaaagtatgttgtatgcagctagggacgcacacacagaggatattttcactgattcctctctgtgggcataactactgtcttgaaggcctttgcttttctggttttatgatttccaagcctctttcctgaatcttagaagtcaaaactcaagctaagctgcaacagaaacttcatcttttctcagaataaaatctattttcttccccttcccatggtaaacaaattatgttgacagacaaatgagggattaggtgaggaaatttgtgattttggaagctcagggaagcagatgtcaggattcagctgagagggaagaatttgggcggggtgggaggctacatggagaaatcagaggcaatcaggaggtgctgtccaagatgaggcatggtggtgagatggataaagaagcagtttctaagatgccactcaagagctctctggagatttacagagagctggacttttttttttttttttgagacagagtctcacgctatcacccaggctggagtgcagtggcacgatcttggctcactgcaacctctgcctcctgggttcaagcgattctcctgcctcagcctcctgagtagctgggactgcaggcacatgccaccatgcctggctaatttttgtatttttagtagagatgtggtttcaccaagttggccagaatggtcttgatctcctgatcttgtgatccacccacctcggcctccgaaagtgctgggattacaggtgtgatccaccacacccggcctcccaaagtgctgggattacaggtgtgatccaccacacccggcctgagttttctaaacttctgggtaaggctgtttgactttggacatgacgctaggcttaactgagcctctattttaccttatgcacagtgggcatactccttaccttacttacttcacaggttggctttgaaaacaaaatcatataggaaaaatattctgaatatgctgaagagccagaaaacatagtattatcactttcttggttttgctgtacccatgtatgaatcttttctgcagcatccctgctgcatgcttgtttctatgtccccatgtcctgcctcagttgaatgcatctggtggtggggagcttactaccctttaaggaaagtcattgtttaaaaacatgtatatataatttttaatttttacagaaaaatgtttgcattgagcccaagtctgcctaataataatagcagtaagctaactctcatgtaaggtatactctgcagcagacccactttgggaactttacatatattaacatttattacatttattattcttagccaccctataaggtgggtactgttattattccgattttacatgcaagaaaaccaaggcacagacagagtaggtaacttgtcctaggtcacggggtaataatttttacctgctggctcttgtttttctgtccatagctgacccaaaatatttgatgaccggtattttgtcctctttgagtgctccctttgccggtctaccatctcctttcccttgctttcttctgcatgtgcctccttctgaagttttcccacagcaggccccactctccaagggtgtttcgacctattcagaaaagagttgcattgctgggtccccttggacctgctgctgccggtcggctgggaagagttataaagaagaaaggacattttcaagctaagctctcctggaaactggtaggatggcgtgagctggtccacaggccccagctgccagatgatgggaattgggatcagctgtgacctaattatgagtctcgtaaacctgcattgtgcccttcattttccagctcattgaccactcagagggggagggaaaagggatgagattctggtcaagtccttcctgccactaccatgtggccaaggtcacaggccaatgatgtccagagggagttggggcaggggatgcgctctttgtcttctctgaatgaagcgagcgaggagtgaggcagagaggaaggaagatttgcagacaagcaagcctcccaggagcttgttggattggaatgtattctcaggtctattgtagagacagaaattccagatttagcattctgtcattgtcagaataacaaattaatatgtcttatgcccacacaactacatatacgcaaatatacaggcatgaaacggaatatctggcagatatcatgtattttataactctttggggacaaagactgtgctgagaattcatttttatactgatagagaaccccagctccccacctccaaaccaaacacataatctccacatcacatagatgtgggcgattcaaattgctttctcctgtcaaaaggtagcatctatgaatcactaagtagagtctatgaaattctcagttgagaatgtgtctataaaatttcctcctttcttacctttttaaataaaattactaatttctctctcaaatctgactgtggaagccttaggactagtgggatattgcagaaagaatgtgacgtttgggaccaggaaggtgctgagattcggattccgcctctgctgcttaccatgtgggcaacgctgactctgggcaagttacttagctctcttagcctctgtttcctcatgagtcaaaactgggaataaataataataaccttttagggttgttttatctctatgattaaacaaaataatagatatgacatacattatgggtctatcacatgataaacgcttaagaacagagactccttttactttccagttatccaaggtatagagtatgagaggggcaggtggctgtgcagtggtacatcttagtgcataatctctagatttttggatttttttatattgagaagtggactgccaaaatttttgttaaatgaaaatattttaaaaataattaccgtcaattaacattatttcataaaaaagacattctaacattctaaagaaagccttcaaaggagtgtgtgaaaattaaataagatcgtgcatataaagtacttaatagtttatattagttcctagctttgataagcattttaaaaagcactaggtatagtttttagatatattagttttagtattggtatagtataaatgttaccataccaagaatcaagtccaaaatctctaacatgacatataaatgggtgttcacacacacataagccatttgtaccccacaaccccagtataaagctatttacagatacactctactccagccaggggtcccagatataaacacttgtaggggctgggtggataatatcattaagtaacatagatagcaggtaagaaaaactctgacgtggtgttagtctgtcttttatccttcattgttgttttaaacatggattcaagctctgaataataataagagccaacatttataatggcaaagaagaatatcatcttgctatgtgttcaagctaagcatatgtttatgtgtaagcatagctttgccaagtataaaaactagtttggaaatcctgtatggactcaatcagcttaatttttacatttttaaccctctgattttgtctttatgtttatcttcaccagttctggttctgcatagaaagtctttagaggaatgtaccctttccgataatgcttccagatccaaaggatgcctcgaaagtgaccaggaattgctacagatggttgacttttacccagttgccaacgttcttctggggatgctgtgcgttttgtgtcctcatcccaactcctagccacttcaggtttttatagatgatcttcagacaaaaatagattaagaattagccaggaggggtcaggcattgtggctcatgcctgtaatcccagcactttgggaggatcaggtgggtggatcacctgaaatcaggagttcaagaccagcctggctaacatggtgaaaccctgtctctattaaaaaaaaaaaaaattagccaggcatggtggcacgtgcctataatcccagctacttgggaggctgaggcaggagaatcacttgaacctgggaggcagaagttgtactaagccaagatcgcgcctttgcactccagcctaggcaacaatcgtgaaactccatctcaaataaataaataaataaataaataaataaataaataaataaaaagaattagccaggaggaatgacaaatagatttcatctttggactaccctctttaggggaaagttgtggttcttcatcctgctggtatttaatggattcagcttcatataggggatactagcttggaaggggagatacttagagaaaaaatgactttcagtgctatagcaaaaaggaatttaaaacatttcaaaagcccccaacctcagtacattccaaagcaggataaaataaatacaaacaaaaaatcaacacctacaccaaaccaggctaatataaaacaaaacctacttaaggtccagatttttttgtcccagcatttaaaaacagtgccagcatggactgaagtaaacacgctgcaatgatttctcagcttgggaaactgtcctttcttatatgtgagatgcctacagaggaagcagaaagatagtaatttctttcccttgcttttctgggagatggatctcagtgtttttgtcccttggtcctagccattttaaagagactgctgccagaagaaccacttagcacaattgtgaaaacctagtccccatccatagcagagatgctttcctttaagctgtactttttgagatattattgacatcaatatttgttaaaaccaaccttcgtggagctgttgctatgtaaaatatattacacttaggtcaccaagtcattagtccaatataggtatttggaagttggtttttagtcattctctttaattcaaatggaattagggtcagaagaaatgttcaagtcctaatcacttagaaacccatatttggcgtgttttgttgcttgggtaaagggagtaagacctcatggcttgaaagaatcctaccagaggtgttttgtttttttttttgtctgatttcctttttcaaacttgataagggagtaggcaaaaaatgtctgagtcaccagaactggggtttcacaaatgaatggtctcgctgtaacctaaagtaagggttgaagtgggggaagatgaaacaataggtggctgtagcactggaagaatatttgcagccccacaaactaatgtctgaattacttaggatacatccctctgtctagagccagcccaaaaaaatatgtgattcctgccctgattcagatagagatatctccaggctacttactatatgtatttattatgaagtacatgaataaatcgccacccaaatacagtaaatgcattggtattaaaaattaacacagactttttgttgtctgtcatcccatcattttctctttaatgaaataacggtctggaataccacctaatggcctgagatgcctcagagtgaggtgtgtttttaccaattctttaacttaatcagactggcctcttgatatggggccaggttcttctgagtaactcactctgaagaaaagcaggatggattgattcatggaatatggaagtgtttgcctagtgggcttcttttcaaaagctcaagaactttttctaaggtccctggtgtaccctggggaaaaaatattcttgactttttttttttttttgtcaaactgtttgtatatgtggggtgtgtgtgtgcgtgcgtgtgtgtgtgtgtgtgtgtgtgtgaagttgcatgttggtacatacttgagatgtcactatagcttttcttgccatttttcattccatttctactgggatgagcaaaattgacagcttctagacatctggaaagaggcttttgatcttaggaagtgaagtacataatcatggccaattttacctatgaggaagataactaagtggtttctcaaatgccagaataaaaaaatgacttcttgtttttcaaaacaaggcatagagatcccaatagcaacacagaatgtttctgtgtatcagagcagaaaaaggggaattgaggtagcattggttgaacacacactatgtgccaggctttacactaatttgcttgaataatttaagtgagtaacagaacaatgtttccactaagttgcagcaaaaactacacatcttagactttccttagtgacatctcgaatcttcagggaaggtggggggtgaataattgaaataactcttgatttcttatattagggaccaggaatatgcccttgataggaaatctgtcatttggaggtcattttggccctttctggaagaaaaggagacattgagtgctttgaggttccaacatcaccacataccagttagtgaaggtgacagtcttctggatctctgaccagcaccagggctgttggcccttgttgctgcccccatcagtctgaacagactcttttcccaaagaaatttgctaaaatgacaaatcagttatcactgtctattaggacatccactgcatccatctatcctaatatcttcctcacgtatgcctcagcggcatgttttacttctatttactggtaccacagtcttagcaaaagtagcacattgattataggagttgtgaagccttgagccctgacaaatggggaccacattgaagaaaatggagggacaagatactaatacaatttccattaatgacctggatagagtccccaggcattgcttatgtatttaatttttattctgattatttttaacattgtaggcagaatgccagaacgccaaccatcttagcttcttcaacattatacagtgaaagccagaggggaaacctaactcatcagatcatagttgacattgggggaaaaaaataaaggtcagcctacaaaatttcttcagactttgattaatacagttgtagatttgaaaaaaatgttttatttgagttttcttcctacatattttgagtttggatgtaaaatattttcttttgaatttggaagaccacttctctaagaatggagagttaattagatgattttcttttctttctcattggaaatgtaaaccgtgttcatttattcaacaaatattaattgagtgtctgctatgtgccagacactgttttaggaacctggaatgctttcaggaacaaaaagagaggaaaaaatatccttccttttgtaaagtttacattttagtaaaaggagaaagaggcaatgcaataaacattacaagtaaattccttttatagtatgttagaagattatgagattataggagaataccaagctgagcagggtaagaggatagaggtgctgagtaggaggataggtgaatccaaagatgaaggggttggttatgtcgttatttggggaatataaggccagtacgtctggaatgcagggaagagggagaagttaactactgggagccagagcatagtaggtctttttggcccctgaaggactccaacttgtactttgagttaaaatgggagccactgcagagtcttgagcagtcttaactcatgtgactagcatgagttaacttgagtcttaagatgcttgtgttggcctctgtaatgtaccaagaacagtttcttgccctatgattccagttttcgataagttatgccatcacttgctgcaaaacagacctcacccaccatgacactgggccagtggctatttattcctgatgaggcattgtaggatctagatcaaactactgtttcttccaagcttcctgattgcacattttcatggaaaaatgcaagggtatgtggtgcctaggaaaaggacagtagaaacggtaatacattttactcttgagcataagttttgattaactttgtcattatttcaagccaatatagccacaaacataattggtggttatgaaattatgcaatcacactgtctgaggcctcattaccctttaacttataaatctgccttgccatctttccatgatcctcttaaagaatgtacctacccaccacctacataataaaaaaagccacaagccccagccttgggggaattgtattgatttataaagagagaggctatcacttgctgttctcattaacctggaaatagacaccacattttatctgctgctctgtttcctgctgtagatctgtgtagtaaatccattaatctgtctgtccattcatccatccatccatccatccatccatccatccatccatccatctatccatctgtccacccatctgtctttccatccaaatttccatttttaaagggactattttgtgtcaagtgtcatactgggaggcaatatatttcatggttagatatataggctgtatgtagcctcagactgtctggaattaaattctgcccattactttagctatatgaccttaagtaagttttgttatttgagcctcagcatcttcctctgtaggatgagaatggtaatcaaatgtatcgaagagttgttataaggatcacaaagttaattaattcaagtccttttcattttgtcccggaggaatagttttagtagtttgagtttgcattcaatcatctcccctttcgctttttcatcagtttattcctttgcagttcatccagcagcctatcaaggacctagtatgtgttaagtattatggagacggggatatttttctgagaaatggaggctgtaggtgtgtctctagcacctaacacagtgcttggcacatggacaatgccctgtatatatttcatggaatgggtgcaactccctgcccttgaaaagtgttcagtgtgtctgtagaagtccagtgccagatgggagtgtcactggtgcagtgagccagggacagggagcagagaaagaacaattgagaatatcagagggagatgatcctccggctgcttctgctggcctggacatttgaagggatttcttactgggactggctcttttgttctgtggtttgtatttctgcctttgtgcgaatgacttgtctgacatttctgggactccatcctgatatgcaggccagacaggtgggatcccagtagggaactaggtatgcctttctgtgtattccaggaagagtttaaccttgggcagacagggctagtctttttgactttatggtatgtttaatatcaacacctggttgggggtagggataataaatgtttggcttacaggacttgcagctttgcaagatacagtggtggtgcatacacttatatttgttatgactcatcttagtgcaaaggcaatggagtacctctagaaaaattgcacatttaaggggataatttcagtggtgactttagtgggttttagaagcacgtgagaagtaaatatgggggactctggagctagaatgcctgggttcatagctcttatcttttctttttctttttttttgagatgggggtctcactatatcacccaggctcaccttgaactcctgggttcaagtgattcttttgcctcagcctcccaagtagttgggactgcaggcatgaaccactgtggctggtcagctcatagctccatcttttattggtcatgttaccttgggcaatgttgttagcttctctgtaccttagttttattgctgtaaaatggttctaataattacaggctacctcattggaagttgagaggattaaatgagatgatatatttaaagtgcttaaattcttggctcataataagcattcagtaaatgtgagctattatttctctttctcctcctcatttttaattttttaaatactacctctattactattgtgaataatgtcattataaaggtgcaactagatcatgtttatgaaggtaggtaattgcctagcacaggcctggcacagataagcactgagcaaatgttagttttctttcacatgggtcattaaagtccgtctgtaaagtctcagggactttctcatcattttccctaaacctaatgcaagatattcacatttctttttgtgcaaagaacaatcttaattcagctgataatcggggcctcccttaccttcccactgctcactataacagagaacaagtactagctcataactttttatgactttgtattgaattaaaattataatgctttattagttatcttttgctgtttaacacatttccacaagcttggcagcttaaagcatcacacatttattatctcatagtttttaagagtcaggaatctgggcacagcttagctggatcctctggtttatggtttcttacaggttgcaatcaaggttttagccagggctgagttctcatctgaaagcttgactggagaagaacctgcctccaagttcacctggttgtaagcacaacttcattcctggagtgttgtgggattgaaggtgtcagttcctagctggctgttcactagaggctgccctcagtttcttgccgtgtgggctttcccatcatggcagcttcaccaaagtcatgagagagagagggagagagagagacagagcctgctaactagatggaagttgcaatcttatataaagtaatcacagaattgataccccatcaactttgctgtattctgtttgttacacacaagtcacaagttcaacgcaaactctaaaggaagggattatgtaaggatgtgataccaggaggtggggaccattgaggctatcgtagtctgccatagcatgcctgacctgtgggttgtcttttagatgctttattttgcctaattttattttattttttaacctcagttcagagaattcaatttattagaacaggtctgaatggtacagaggtgctttaattattcagcagaattctggaaattttaagttttctagaaatgtatagttttgctttactttttctccccttataaatagaaacctgtccttccatgaatgaatgctacagtttcagagatgctttgtttttcccctgattgattgtcagtgggcagtagcctctaataaagggaacagttttaagtttccttttcttctcagcttctctgttaaatggttaatgatctggaagcaagtacttggaggtccttagggagctcctatttaaaggaacactgtgaagagaagttgccttctacagtaaaaaagtggggatgattagtcctccatttacatgtttagtaaatctgaatatttagacttccacggataccccctgccaacccccgccaaatagatgagctgaaagtacaggatagtactctacatgcatctgactgagaaagacttttactatctcaccttagggtcctaagagaagacagctggatggttgcatggcggtagaggtgtcaggaaaagctcccttataattattttcattcctatgtttctactcaatactatttaaactgaaatggggcttcatctgctcctttgtttattcagcaaatacttttgagcattttttatgatccagctactgtgctaggtgatggggttacaataagatacagtcccagccttcaaaaacttatgtgctcaaacgttattctccaaatctttattctgtttctcatctatcattaatgggaatagacagctcattttttattgttcttggaggctagagagtacaggcaaatgcagatgatcaagcctttcttattgccccactcctagttgattccctctccctttcttttacttatgacatgcaacttccacaaaggcagtttatgttagttatctatggctgcataacaaattactgttgaacttagcagctaaagacaaaaacatttattatttcacagtttccatggaggaggaactcaggcatacccttgctgcgtcctgtaactcagaatctctcagaaggttatcattgaggtgtcccctaaggctgcagtcatcctaagggtcgactggcaaaaggtctgcttccaagctttctcccggttgttggcaggatttagttcctcactggctattggccagatccctccctcattgcctcaccgtgtggacctttccatagagcggcccatggcatggcagcttgctttactagagagagcaagtgggaagagccagagagttataaacaagacagaagctatagtctttggtaagctaaacttggaagttatgtcccatcacttttgttgtattctattcaaaaaaagctacttactaggtctagcccacactcaggtggagaaggttatacttgggcacaaatactaggaggtagggattgttgtgagccattatagaagttgtctaccatgggcagaaggacatttcaattctggaaggtatctgatatggagactcttaaggcacaatgagttacccgtgagctacctcttgtacattcatagctgtccaccctttttatattttctgtggtatcagcacagagattgggggcagggggtggaagcatggaataaggaattagatgccaaaactaagaattttattttttacaaagcgttatcacatattaaatctggaaaggacattagagggccttatgcaaatgaataaactggcctagagatcttctatgcagcccccccagggtctgttctactgcagaccctggatctcctataacagaactataacagaacactggatctccacagaaagccacaaaggcccagagatgtgttcgcacagatgtcatcatccctcttctagtccctgcaggagcctcatgggagatcacgtgaccagtatttcacagctctttcccccagcacagaaatatctgccgtgttgagaggcctgtccatctcctagtccctgctagagcctcatggacaatcacgtgaacagtatttcccagctccttctcccagcacaggaacaccctgccatgttgagaggctcactcaagagcctcatgatctgcctgctacctagcaatagctttgttacataggttgattctgccttgtgcctagaaaataaatcatgtttaggattaataatagtttatataattaatatatgtgccatgcttgagccaacacattccatcacttatcttcaggctggctgcctcctgggagccactaggtctcgagctgcaggctgagcatgctgggtaacaatgctataagtctgcttactggacccagtcctacagcctatgaatattcttttctgtatttgaatagcaatagctggagatgcacaagtcttgataaaataattttacatttgttatattcactttttttcttgcctgtcaaaaatgtcagcttttactctctggcttgcaatctaaatggacccaattttaccttagctactttgatatgatattagctgcttagggcaattgcaagaaataccatacaagggttaatctccctcacccttccattcctttgatatgctgttggaaatttcaaagtgctcaaacacggagatgaggaggcagagggtaaatggatacagaatggctgggaaagggagtagcagtggttggctgctcttaagatctctctcccatggcctggtgccatgagtctgtgtccagtgtgatttttggcaatttctacattctatgtgtatttgtgaagtactgtttttgcatcagatgatatctaaggataaattttgtgttagaggagtgtagttacttgggaggaaagcagtgccatattattttatattaaacatcactggcagaaatatgaggatgggtaaatgtctactgataatttaatagattttacctgcctaaatgacattatttgcaatctgtttatttagttagtagcaaatcctggcacattagcataatacctaagggcaaaatattggattgactgtttgtttgcccttaggttatttttaaaaagctacttgtataaattaaaaaataaagcgaggcttggttgctaagaggatggtgggatttgtagactgcacaggagactaatgcaaatcaaagagaccaggaaggaaaggccaggagaacaacagacaacaggtgaatatccagaaaccagcagattctaacaggcaagaggtagaggctcaaggggagacagatgattgattggcttcagagaggtctggtaggaatctaggttgtcagctgggatcgtgatcttcagaacagaccagtgtggggcaagcccaaagcaataacttggggtcaggcatgaggtcagggcaaggcagtgggagaattgtaagctttgaggtatgtgtaggttaggggcttggtcaggaccaccatcagcaggatcaggattagggctcatgggtcttgaacttctttcattcttcctgaccagaggcagggctagtcccagggcctaggacaaggctaagcctgaaggtggacattatgtgacaaccaacaaaaggaggaacatcatactagagtcaccgtatgtcctagtttctctaggacaggcccactttacatgtgttgttccagcatgataatcagtggttctcccctttcacttgaaagtgactgacttgcgtgataagttacatagttaccctgattattttccagaatgtgtttcataaaaatctttttagaagaatgtcatccagagaccacaaaagtagagttctctagtcacataagtatggcaaatccagaatgaaaggaagtttaatggaggagtctttactgcaggatttctcactgcctttatatgctaaattataataggaattgctaagaggggaatagagttcttagtttcccatccttggttgatctatttgtacactttggtactcctgagactacgttatgtggaacacactttgggaaaccctggttagttgaatatggggtcagaaagggaaactggtcattgctcctgctgtaataagggtgcttgcaaagacagcagtcaccagttaaataaataattctggaaacaacaactgcagactctgacaaaatcttcaatttgctgattattgactgacattagcagaggtatatgtgactagccctagctgagtaactttctgaaggatgacttgttctctagctcattggcaaaaccacttactacttagggcatgggaagaaagagaattttctttgttaagtctttaactccatgatgttcttaaaggagagatgaatgaggagataatggtgtgtatgctgtgtctctgtgtatggggaaggggcctcaggaactatgtatttttcaccagcattccaggtaattctgataaaggtagccctcaaaccatttatggagaaacatttcctgggagttctgatgagaaactcatggtgataaaaacccattcatagtggtcatttctttaatcatatgagtcctttgatatgatggccagtgatctgatatttgcgaagttcccactatgtgccacaccctatctatgtgctttcagtgcttaacgtatactgtgtgaaatagtcctcatagaaatttagcaatggccccattttacagaagatgtctaaagatagaccttcaagtgggcccgacttactaggccattccatccgggcccgacaagagggtcacagctcttagacccacccctcagcaactccctaggacaaggacacaatgaggcaaatctctgagcctttgccctaaggttacacaaagctcatttagagccttaacaagcattaagaccattccattacaaacaggaccatatgctgacacattttatctctctgcctggtggaatgggtcaatatcaaacaagctaatccagggagaatgatgcattgatttcctaggccttaccaagtgtgcaggctgaagtcaacctacctaggaaggttttttttttaagatgaggtggaagagagaatacagcaagaaacaaggagaaagatttgctttgcttttgttatggagttacaaatccagacaagtgacataagcagcttcttgtttttagctgggccaaagaatgtttttcttttttaatcttattgaagagccaggatctttgtaattccatcaaggatttcaaactcaaatgcttacaggggcttggagcatgaggagatttagaactgcctgctgggtgggatctatggtgacctaaagaagacctgcctcttctaaaggggactcctgataataatgtattgtatgtttcaaaataaccaagagcaaatttcaaatgtcttactctaaaaatgctagatgagcaagatgataaagatgataattagcctgatttaatcatttcgcattgtatacgtgtcaaaagatcacataatattccataaatgtatacaatcatttatctatcaaaaataataacaaaaaataaaaaagcagactgtgctttttagcattcagagaatagattgcctatggaaaatatggctgttttctcagaaatttcaactttttaaacaaaagttgaaaatctatattttttgaaagtttttctgatttttaaaaacagacttcttgagatataattgatatacaaagagctgtacatatctaatttgatgaatttggacatatgcaaacatcgatgatgccttcaccataatcaaggtaatagacatattcaacacctcccaaagtgtcctgtgctcctttcttttttgtgggtaagacgcttaacctgtgatctaccctcaagaaactttgaagtgctcaataccatattattaactatgggcacaatgttgtatagcagatctctaaaatttattcattgagcctatatccattgaacaattccccatttctccctcccctccagtccctggaactaacattacactctctgcttctatgagtttgactattacagatatgtcatataaatggaaccctgtagtatttgtcctgtgactggcttatttcccttagcgtaatgtcctccagtttcattcgtgttgcaaatgataggatttccttcttttaaaaaactaaataatagtcatgcttggatgaaactttgggttgtttccatatgttattgcgaacagtgctgcaataaacatgggggtgcagatatctctttgagttcctggtatcaattgtttagatatatgtccagaagtgggattgctggatcatatggtagttttatttttaatcttttgagtagccttcatactgtttttcatagctcatactacattcctaccaacagtatacagggggtccaatttctctacatccttactaatagttgttatcagtttttttggataataaccaccctgacaggtgtgaggtaatatctcatatctcattgtagttttttttttttttttttttttttttttttaggagatgggggtctcactatgttgtacaggctggagggcaatggctattcacaggcacaatcatagcatgctacagccctaaattcctgggctcaagtgattctcttgcctcagtctcccaagtggctaggagtacaggtgcataccatcacacctggttctcactgtaattttaatgtttatttccctgataattaacaatgttgatcatcttgtatataattgtaggccatttttgtgtgtttttggagaaatatctgttcacctcctttgcccatttcttaatcaggcttttttcttgttattgagttgtaggcattccttatatattttgggaattatccctaatgttgcaattaatttgagtgtttaaaacattccataggccaaataagacatacagacttctggtcagtgacctctttcacagctacatgtgggtgacgctatgtcactcaaataacgggacactcgtttactgggtgtccatggtgttgcagacatttcataagctacctcatgaagtcctcaaaacgaatccatgggttgaaataatcatgcccatcttacagataaaagtgaggcccagagaaactaaatggtttttccaagttcacacagcctacatgtggttagtgcaggtctgaattctgattggtttgaccagaaagagctgcagatttggggaagttttgttttctctcctctggggaaaaagagtcccactcagggttattccattactacagatggtcactgccccggggccagggccatgccacttttctccaaaggttagtcccaccggtatgtgatgcagttggtggactggctctcctttgattagcatgagcgacgagttagtaattgatcatccacctttctaaggttgccaagcttagatttactatattttgtaaaatcacccttccacgtccttaaagtccacgtgcatagtctatctagattctgatatttcatgtgtgaaattaatcctctcggactgtaatgaaaatgtggctgttagcctctaattaagatgtgtgtatattgattgcagtggtcaagtctgtccactgatatattaaaataaataagcatccattttatattggaaattttgtgacacttcttgagacaccttgagtttctctgagttgttacaaaaccagagcaaagagtcaaagctgtaatttctgcctatcactggcttttgaatagattatgaactcttagaggattgggtttgtatctatatagttctctttatacagagatgaaggctttcacagcagtatctataattgggtgtttaataaatgctttttgatgagggtaatggtatggaaataaagctcttgagatccagagtttgcttggatttcttgcctcattagggaggaaaaggtgaatggggatgcatgggtaaatacgaatgtcaatctcaggtaggaaaccatatgctcttctagcatgaaatgctgaaaagagagaaaccagaagggtgtgactaagacagaaattctgctgattgacactaataccggtatttaccaatcttctgtaacgaggtagactccatttagaatctggtgatgtatcgcatacaagttagattgcttgacaagtcacaccaaggtttactcaaagtcactgccattatggtatataatcacaggctcaccagtgtcccacaagggtgaaggcagaggttaatggttttctttttatttgcattattacttgatctctggctttcctggtgagatgggtttttataagctcttcccatctcactttttgaagtgtttttaagctattttaaggctgttttataggtgccttttcttatgtttgttttgtatgctagaaagtaagtaaagaggatccaggatatgagctattgatactaccaggcacactgaagtaagtattaagtcttttattgagctttctaaatggcaaagtatatttcttttttatttaaaatgttaaaaaaaaaagtggtcaattctaactaactgccctaaatgtatcaaaaggcccttagaagttttcttctttgccaccatggtgaatccttcaagcaaattgattttaagcttgtacaacaatgtgaatgcaatgacactaaagtgtacacttaaaatggtacattttatgtatgtatattttaccacaataaaaaaatagattttaagcaactaatcaactacgaggttgtcagactgattcatagagcatgagcaatattttgtattcagtactataatgtagagaatattactctgttatagtcaagtgtaaaaaatatcatattttattttccttatgttaaatttgggccaggcatggtggctcatgcttgtaattccagcactttgggaggccgaggagggcagatcacttgaggtcagaagtttgagaccaacctggccaacacggtgaaaccttgtctctactaaaaatacaaaaattatttggcatagtgacacatgcttgtaatcctagctacttggaaggctgaggcaggaggattgcttgaacccgggaggcagaggttacagtgagccaagatcgtgctactgcactccagcctgggcaacagagcgagaccccatctcaaaaacaaacaaacaaaaaattaaatttggctctgagttctcatctactggaaaggtgtgtgagaatcaattgtgttatatttaaggaaacccatttcttaggggtctttgaaaatctaaatgagacttacatgagatcaggaaaatgggagaggagagctgcattcttcccatggggaactttgtaatcatttttctctttgccacacaatggaactctgcgatttggcccttcaccgcctgttaggtttatatgcttggaagtcagggagaggctcctgtaattgacctctctattgaccacagacttggccagaggagcaccttctgctcttctccaggctgcagtgttgttttcacctccagagggacctgcagcaatccttttcacctttggcattgcttcaaaggggacatgggtctctattagtcacagaaactcagcaagatcttatctcacttcagaaagctcatatcctctgagtggactcttctacctgcttgaaccccagcatgcagccagcccagattctcagacaaacctttggatgaagaaagtgaaactctgagtgacaaataactttggcttgtctgccctaagaaacacaaattgttagtgctcttgaaagtaaaggttctgagactcagaacaggatggcctaagatcttttctatataggggaggaaaaaaatgtttttctgttttctgaatgtccaaggcagccagaacatgacaaaattttatatatatatatatatattttggcaatgcctagatgagtattagtaacatactagttgcaagggtagctttagagacagagaacttgggtttgaatcaggttgaagcaggttaagttccccatgcctcaattttccccatctgtaaaatagaaataacagtaatttttttatcatgaatttactataaaaataaattaaataaaaattaatatgtgtaaagtactttagtctggcatgtagaaagtacttaatgaggaagctataataataataataataacaattagttaacattaccaaactggttattcagagtttaatcctctggaactctatgcttagctctaatctcaaggagtccagggaagcagactaatcctcactattaaattttgtattgattctcggatgttttcaaagaatcctacatccacatatctcaaaggagtgctattgatttgatcattttatgaaattcttacccttttgctttcagaattctagctagatgacaaaaaggaaataactcacacatgtaaattaatcaaactattttggaactcaaacattgcttgtggaagacttgcagattgagccaagccctgttctttattaactctggataatttgctttctttgtttgatccctggcctttaagtgaatgtcaatctcttgcttttttcctgaagacctataaggcttgctgactaaatttcatggaaattctttgagattcttagctagaagaggctgtaaaggccaagtgctataggtactaacgtctcattgctaacactgatattttaccttgatagtaacttccaacttgacataaaagcttgtaagcaccagatctttgcctctccccatggttgtatgtgtttgaattctttggagaaaattttatgacttgcatggcttagggtttcataaattataaaaatgttttatctctggtttgaatagagtagtaaagcatatccctgatttctcacttcttccataacccagtgccttcttatttctaatgcctcctagtctgatgtcactgagaagatgtttatggccttgcttgccagagaactaaaaaagaaaacaacaacaacagcagcagcaacaacaacaacaacaaaaaacatctaacaacggagccaatgcttactcatgccagtcccaggattccatatatggggacattgggcgtgttttaagccatatgctcataacctttgtgtcatgattcagttggtgtgtcttgatcagtttcctcatctgtcatctcttggaaagcatgtaaagattaatcacagatatctgcttgtattacctagattaatgctagatgattagcagatgaaccttaacatctcagtggcttaacaaaaaaaggtgttaatctcccacttctatatgaagcccaggtgggagtaaggctgtactccacaaagtcattcagagaaccaggctgttgaaggctctgccatttctagtaaatgacctccaaggtggttctcagcacaaacatctattcacagatggagaaagagattttgcatatatatttttctaattttcatttttgcaaaatgtcataataagcaggtaagatggagcctcagttggagttgtggttagtcatggtgaaacaagagttaaaaggtaaaatcgacagatttcctatcagctatttatccatcattactaagaattacggagtgttaggcttagaaaaggtctaggaattgactcattttcctacttccaggagatctggttctagaacccaggacttccagctcccaggcaaattgaagcgcttcttcttccacatgggacccacttctatgagagcatcagtctgttagggttaagtccaagctctaccacttaagagctgaacaagttatattaactgcaaagggataattttagcaacttcctcattaggaggttgtattaaatgcacaatgcgtgacacacagagacttattgtcattattaatatcccaaattttttaaatggtcacaataattccccttgcaacttctgtcatatgaataagcccaggatcgcttgatggatgatgatgaaggattcatggccaagtcatccacaccacctcagccgactttgagtcagtcaccagacatgtaagtcatgtaagtaagaccatcctagagcatacagccccaggcaagccagcctagatcagaagaaccagccagcctactcacagaactgtgagaatgaccaatgtttgttactttaagccactaagtttggtggtggtttattatccaacaaaggctgatacagaaaggatcacaattgaggagtttatgtgagctcaatctgaaagtttatatgagctagatttgcccattatttcactaaattcatcacatggccccacctaactccaaaagagactggaaaatgtaaaaaacccagacagaaagggaagtaggctccaggacagctggccaatatctgccacactgatttaccttgattttgtaaaaacaaaacaaaatcaaaacccttaggtggcaatcagagtgtaacaactttccaggcaagttctttgggacaggccactagacagtcacttttagtttatttgtttctcacaggaagatagagaaaaggaaatgcgacagatgtgatgccttcctgagaggctgtctggtaaatcaattcctgccaaagttctcctacaaccctaagagataaaaaaggaacctgcaggcgaaaaccacaaggtaggaagagtttgaagctgtgatctcttagaataagagcttttcatttattctttctgagaaggaagtctagggcatctgtcattgagagtgctattgatataattttgctttctgccccgtaggatctgaagcagtcctgccccaggcttagagaagtaagggcaagctagcccaattctgtttgctccagcacatctcatcccagagcatttgttgtaaggccctcttctttttgatcccatgtctacatttggatctctggtctgggaggagaaatctcagaggctatgaatctgatgaggaaggcaacttggcagtgcagaaagcaccctgctttgcagtcagactttccagcttccaattctacctctgccagattaattagctctgtgtgatcttgcacaacttctctaagccttaattgtgagaattaatattgtatttattaggagtatggcacacgataggtacttattagatgttagctatcatcatcatcttcatcataatttgattttgcttttcttattccctttgatcttgcctcctagtctaacaggagaaacattagaagttggtggagacggcctagaaaaggaagggtagattagagagcaggagatagtgaaaaattacagttatttcacaattgaaatcctatcccatgtttgcattgttaattatagttttcgaaagactgtcatctaggcaatctcatttcgcatgaccattctatgagacacaggaacatgcagtctattttggcagataaaaaataaatacatgaggagttaagtaaaaactgtgttactgagactgcagtaacttttataaatcaatgtgcaaaaaaaattcaagtattttggaatgagatttgttggattgaaatattttatggtggtctgtaacatcagctcgtgagctcatagaccaaaccccatcccaaatacctggtgttcaggattatcaatataaaaattgatttaagatccccataattcatttactcctatttcctgacatgcagaaagcttactgccactgggttatttcatcagtttttccccatctctccataactagtctacctctgtatgcttggcttctataacattgcttactggtctttcttaaggcatgttgtgttctgggtcagttctctttaatctgtggccaaactcttgctcagatctaggaatgtgtcatctatgtgcatctttgttctaagctgaacatttcttagcactatacctgagtttctgctgccacctttcatattcttttatgatttgcaaagctagcaggaacccaaagtgactttcataaccaagtgtccagggtctccaggagttcaggttctctctagtaaacagttccaagaccgcaatgaaagagatgtcacagagttgtatatagtataacattaactaatatttgaatgataaattattgccataggaaactagagaaagaaaaagacactttgggatggagaggttagggaagattctgtggaagatgtgagatctgagctgtgttctatggggtagctaggtcgaggtaaaaaatgccatagccaagcgatcagaggcataaatatgcaaggagtcttgggtggaatcacaaagtttagcagatgagtacatgaaggtagaccctttgtgccaggaagtaattttgacagaatgttggagataattttgcctgtaatggtttctgactgacagtttattcattcattcaatcattgagttcaacaaattcaatttattaagaacatactatatttcagtaactcttctacatcccagagatacagcaatggacaggaaaggttctttccctcatgctgattacatcttaagtatggagacaaacaattaaaaacaagcagatacacacagtaatatcgtatagtcatagaactatgaaatgttaaagcaaggaaacacaatagtgactataagggtcaaacaccattgtagagaggaaaatcagggaggaccacttgggttgggtgatatttaagctgagatttgaatgaagaatggaagccattcttgtgaaagatctgggtgattggcattcctggcagagggaacagctaatgcaaagctctaaggtggtaacgagcttggtagagtcaaggagcagctgtcattgctctgtagtgcacttggaaaatatgctcaggtctggtcctactattggcacattaagccagaatctctgagatgaggtctaagccacagtgcttattaacacctctccaggtgattctaacagttagccaaggttgaaaaccgctgtattaaaggaaagccaaaagatgaagggcttttttaagcagacagagaacactcaccaggggaatcaatggaggagggaagtgaagaatgtaactgtgcaggaagagtatgctagggatagagggatgctcatcttcgacctggtaatcaatggaatccagactgacctattacaagagtggggtccctatgctctttacatagtctcccttgtcagtttcctgaaatttattgtgccaactatggtgggagttaaagcgttaaggtttggcttatttgttttgggcagatcacagagatccaggactcagagctagggaatagacagctgaccccaagctggaaaaactttcccagatactccctcctgcctaggaagtggcctatgaaaaagcagtttaaataatggcagcctaaaatatagttctatatgcaacatttttttttctatgaaaactaccttttgccttatacaacctgttaaaaagtgggagatttcactaataggagggcaggagttgagcacagatccaatagaggaaaaatactgtcttcaggcagataggggatgtgccactggggccgagatgacgagtttcgtgaaaaacagagttcaaaagaggaggctcttgagtgtaaagataatttgaggggaaaagaaaaagatagaatgtgactggaaggaacggaataggaaaagcagcatgatatagatggaaatctcctcatttctttgacgtccttaacaagaacatcaagtgaggcagaatagtcaagaacttggactctagaatccaaattggatgagcgccttaagcactttaatccacagtttcctcatctttcaaatggaaacaacagtgcctaggattcgttgctgtgaggactaatgacaaattgcatgtaaaaagcttggcacagtacctggcacttagtccaggccccactccatggtattcatcaccagtgtcaaaattgccataataattaacattgcctcaatcacaaaattcatgtcatgttcaccaacagccaatggcttccagataaaagtgagaaggccaatatagagctggggttaaacatgtcaagaattcaaagctatagtgcccctgggtattcaaaaagcgtaaagatttgactaaattcacagccaaatggcatttaccccaggtctaccccataccagtcactggcttctctctaatagttgttatcccttttaattctatagaatagaaaagaaggaattggggctaggctgagcagcagaggagagattggctgtggagagtatagatgacacatgaggccaggtgatctctgagaaaagtttctcccatctgttgcttagattgcccatcttggaactcaggaaatctgagatggctttaaagaaaatgatggcattgagaagtagtgagattgcagggggctttcaattttctgcttgggtgttggtggagagcaccgaggtcaacatccatgcttgcagtataaaattctaggtctgtgtccctgaaaagaatgttggtgtgagctaatgtgaaagatttggggagaatttgtgtaaaaagtaacaacaaacaccaaatgcctagttgagttctctgatgggtaaggtagaatatttgagagatttttttgagaatatttcccactgaaacttgggaaataactatagttaatgaattttgaagaaaagagttagcaaaagagaaagtaaatctgatcattaacattatatacaataaactgaactgggaaccaggagacctgtgtgctagactggattacattgagtaagcaatttgaattatctaggtctcagtttcttcagtctgaaaaagaagggcatgagattatattatgttgaatccatcttttgtttaaatttttgttaaattctatggagtacagagaagttgatggcttcaggcacaagtgagaaagtattttaatcttcttacatttttaggccatgtccaaatcatttgttttttcactttattttatttgaatataatttaggttttctttctcatggggtgaatgaaaataaacactttagaaatgtataaatcagtgtgcatttattggagtatggccaataactttagataatgaaaaggatgattgagctatttaatatgttgatttaagtaatgctgggtgatgagtggtagtgacaaggctcttctcttactaggatatcacatgaacaggttctgtcctaattctgcccttgcctagtacatatgggtgactagaatttggtgagagggggctgtctgctgagctaccccaactgtggttacagcacagttacagagatggatttttaagtacacttgttttccctgtcatttgtcatgaaacagactccctatgctcattatcaaaaagcccatatgctatcttcagttcacattttgctcacctctttctcttcattgcattagtcaagttcagaaactagactgtcagctgccagacaggctgctgtttctctcagagataggtgaaaaccatttaggaattcattatcaaagtgtacagcccaagaaggtgtttttgccttcaattcaattattccaaagaagcacacgataaagaaaagtactcaggacaattagatggactatctagacgtcaaaaatcaaatttttacctttgcaaatgcaggttcatattctgttcttaagtcatcagagggaaacatatgatgttcactgtcagtttagattgtcagaaaaagcttgttcaaaatctgtaaagttgtcactcctcatgtattttcactcaagaaaccagggatccaacttcctgtgcctaaactctctgcctagacaaatggatcttttgggaggttaagtatgtcttagaagaatatctgagctggagttgcaaatagaggaatcatcttttgttaagttgttagaacctagataacatagaagattactctatggggtttgaaaaaactaagacatgatgccctctcatgagacctttacagtctatttggggagttaaggcatatatgcccagaactttattttcagtggttcttggcaattttaaagttccggtagtatagtacaagtacccaaatgtgatgcccacaatgagggctgtggtaagtcagaaaagaggctgggttttggtttcttaggaaatggtaatttacatggagtctcacccacctggaaggattgcagtctttatgtttagcatcactttttgtcatttaaatttctctctaggtggggatctaatccagtccggagttacaggagctagaggtgatcagaaagtgtgcctaatttgacttttgctccatatgtgacataaaatagaaaaaaagtgaggtccccaaagaaaaggtagcttgagaaccaatgagagtgtctctccatgaactgtcaaaacctctgggatccagcagaaacagggtttgatttaagctgttcctgggtacaaaatgcgagctcttacttggcatttatccttgacacatatgggagcaggctttaccagaggcaagaattcaatcaaaagtcaggctttttgaatttaggtctttctcttttcttctgctataaaatggtgagatcatagcccatgccctaattggttcacagatggatacatcctgaggcaggtgggggtaatcctcaagttttcctacaccaaagcataccccagaacaaagaactactcgttctggaggtgaagataaggcctgtgatgggttgtcccatttgatcactgtggatttcctctctgtgatatcttctgctcccctggaatctagtattgaggaaaaataaccttaatcaggaactgtcactcttcttcaaagagtaggacagtcaactggcctctagcctataaagaaatattcctttcagatagactctagtatataatatcattctgctattcatcaggaagtggctgaataatttattatacaacttgtctatagatcagagtagatgaataataaaatctttagtatgtaaaaaccttacaagaaagttgagacttatggtagcaaaggatccagaaggattgggtcattttgtagttattagtaaacatatgtctgtgataaagaccactttggcaaaccgaggtatctctctacccatcatcctgcttcaggagaacttgggctctgataagtatgtacgtaatgatcaaatcccccacatttaccaacctgctccagtcatcattgtggtagatgtgtgcacgagaaaaatgctcattttattccattccatggatacttacattctctgcgtgtttatttaggaagcattttattgaaatgattcctcattatgtgtaacttaataccatttattcattaatttatttactcagtacacattaattgagtacatacaatgtgcctggtgctgggaaagcaaaagaaaaaaccaccatacttatcctcaaagtcatctcagtctatttgtagaggtgaataataaatgactgtaatacatggtgaggaagaccaccattaagtcagaaattgctaaaggagttagcaactaactgtctaagatgattgggagcattcacagagaaggttatatttgttgaggaccttgaaggagtaggagttgcctaggtaaatcaaggaaataaagggaataaatatcaaaggacccacatgtatgaagacacagaagacatagctttagagaagtttagagatgtttgtagagcatgctggaacacaagaaatgcttttggaaagactctgtaaaatatttataccctaatactaggtatgcaacagtgaacatttaaagtttattgaattaagtcaaccaaagaagacccaagttgtgggattcaagaatagcaaggctctttcaaatgcctctgaaacagttgggggtggacctctccatggtgctgaaacatcccctgttcaagccttcctatctatctggattattggctcctttccatgttcctaaccctcattctgcatgcagtaattacttgattgaccatttcactcactggccctgccaggaccttgccttggatactacctgtccaatggtgagcttattattctttcctttaacctgcacagaccctggatgggcatttgatcaactgaaataattaatgggtagaaacagatattgtcagtgaagtcctttaacttctttctgcttgcttttctcccagatattttagcatttaattaatctggatgcaatttattagttgcttgggttggaatttctttagccttttagcccagatcacatatacttattacgtatttattggaattttcaggaaactgtagttcaaggtgaaactttgaagatagactcaaacaatgggcatgtctcacaatgatacagaggactcagataaagttggtggaatagagtggaaagaatactggatttgaaattaaaagttcaaatcagggtttcaccacttagaagctgggtaaagtcatttagtttattttgaagcctcagtatccttatttgtaaaatgtagacaggttattccctgtatactcacaaacttgtgctaagactcaaatattctcatgtttgtgaaattagtttgaaagtgatgcagttgggaacgattactggataggttggaaggttgtccaactggtgcccctcatgatgggaagagacagaacactgcgaattagcacagtgaaagttaggagctgtgaagaccctagggggcagaggaggtacaggcattaatattatggtgctgagaagttaatatctttctttttaaaaaatagctcggcatagaagctgtcagtagggctttctccccggtcagatttatgacttctgaatgacattgttttactttgccatttggaggataaacaaagctggagagaacaaaagttttattttcctatcagtgacaaatacatagcaatcaatgtaattgaagttcaagtggaataatttatgggggatccattgcatgctcctttgtgtactctgtctgtctgtctctctctcttcctctatccccactctaattcctttcaccgtcatttatttctgcctctttctggtattcagtcctgtatatattaaaagcataagccaattagaaaataattgctgttactctgcttggcccatctttcttgatgtttaggttagtttggcattttattctctccaaagaatgtatttattcaaaaaagacatctaccacatttaatgcgggccatttagatattaatcatcaaaggtaaacgatgaagaaaaattttagtctttaattcttttcttaaaagtcacatatacagagagctaattgacccatgctatgcagaagtgctctgcctgaagcccagggttaatttttacaatggccacttagccaattgaggatggttaagtgagcaatattttatagactcttgtattaattattttgggggatggatataagtttgtggatggggaaaacactctcagattattctaggggagatgaatgatatatctttacaaaaacatataaaaaccttaatttcagtgaatggtttataatgtaaaataccacaatgatatataactggataagagggcttctctgtgagtagagcttatctgtatatcctgatgaaatttaaaaaaaaccccatggaatatatgtttttgggggttaacaaaaggaaacttgggaaccaagaaaaaggaaggatgtaaattaacttattgttgtcctttattgtttgaaaaattcttatcataaaggatggtagcccactgatttttaatttcactgataagtgagcaggaaggaataggtaagagatgaagatgaatgatttaggtcatacttcaataaaatatttttactgtttatttcctgtatcacaggtttttcaaagtagagcatttcttatctggctggtatgatttaggcattattttatcactagaaaagccataacgatgaagggatggtatgttcaaagcagaggattaatatttactacatatctactatgagtaagttactatgcttttttacatatacttttttacatatcatttaatcaacagtcttgtgaattaggctattctgacagatgagaaaactgaaaatcaaagacactaagtagcttggtaagtgttacataaccatgatatgtcagagccattaaatcgaggtgtgcctaactctaaattccatactctttatattacactatgatgtctaataaataatttggttgaaagagtcatttttattcaagataggagagtagactcattgatttctgttagtcttttctatgaatctgttatcggaaatagttgactacaattaaaataattcctggcactataacactactagacatcttcatgtcatgtagccaacatctttttttcctttgcaccatataatctgttttctctatgggtaaaaatcacattttaatgatggggtggaacttcctttattccaaaactcatttgtagtcggggttgggcacatatctaggtctgataaatcagaatagcctattcttctgtccacagctatttatttttaatgttttcaagctgattttacctttctgctagagtcatcagggaagatactctctttccactggggttgttaaacaagtagaatgcaaggctagactactagcaggcatccttctcattaattagcgagagaagagcttgtctgaactatggagggaaaaatagagaatcaatatctaacggtattctttaagaccctgaatccagccacacttgaaccatttttctaaaggaatgtgaattcatagtgtttttcttttatcttgggtctatgttatttgattttaaaatatattaaaatctagcaatgttattttatatgtggctgatacattatatatccatagtcaaggagatagcactaatcacataccatgacaatagacacaagtctgatctaaactctgtatagatattggcactgcccttgttttccagattatctctggagtgctctgagggatcagttggttggccaacaaataccatttgtgcctcaggctctttgtaaaacctaggggaatgtctgaatttcccttgattgagacatctcccttccctgtcaagtcctgaaggagctgtaaactcaaggaataatgccaaaggagaaattagtgtctgccttattatcaattgtacttttgttcataactcgcaataatttggttgctgcatagggcttagcctcaaatctaagcagactttctctgcctcataaatcaaatcttaactctaggcagtggtaaaaccacagtgcccagtaatggttagtaaagaatacaagagagtgtaggccgggtgcggtggctcacgcctgtaatcccagcactttgggaggccaaggcgggcggatcacggggtcaggagattgagaccatcctggctaacacggtgaaaccccgtctctactacaaatacaaaaaaaaaaaaaaaaaaaaaaaattagctgggcgttgtggcaggtgcctatagtcccagctacttgggaggctgaggcaggagaatggtatgaacccaggaggcggagcttgcagtgagctgagatcgcgtcactgcactccagcctgggtgacagagcaagactctgtctcaaaaaaaaaaaaaaaaaaaaaaaaaaaaagaatacaagagagtgtgacccatagttcagactactcaagtctatgtgggtctgcttcctgaacagctggtaaacagtggagaaagccatactcaaatgaatttcctttcaatttcagtgcgtcctttcactacaaaacagcccaatcaatgtcctgggttctgttcactcagactgagaaaaagaagtaaatcatccatagattttggcattttgttattatcacaaagtatgctagacatacacctcataagtgattttgacaaaaagatgtgctgcaagcacagtgcttgaggggtggtcacgattatggatatcactgtactaatctcagaaatcttagtgtatgtttttttttgtctttactggatagtttcgtatttctacctgcatgtggagttctgtcagggccacattcttccgggatatataaacgtggagaaaagtccttacactgtggtacagtgatccgctggaggaaagtgctatatctgtgcattttgcaagaagtcattctatagcatgtgtatgtctattaacacaatcactgaaccagagccaaggttccaaagggactatctgagatcatctttctaacccagtgattctcgagctcaggtgcatggcagaatgcctggagggtttattaaaaacactgattcctaagctccacctaagaccgattgaatcaggttcttttagtgtagggtgcaggaatttttttttataacaacttccccaggcgatttttctgccagtctatagaatggcctttggggatctctttatcttttaccttcaagttaaaacacatcactctgaaacttcatgagccagatacgaatctaacctatattcaaagaggtttagaaaaagataccttcaacctctctcagcacaatttttttttctattaagctcccttttcaaaatacttgaactccacctggacctaggcaaaatgttttaaaatggcatcagagtgaatcaaatcacattaacctgagatggtgggcaaggatcatgaaaaaggacagagggaagcctgaatgtgagtttgcctgaagaggaaatgatgattccaataagtgccttttctttccgtttgcattctgtgcgtagctaatccgctcggcataatcctcttaacggcatgtgttccatcagtattttatctgatctacttctctgacaatcctatgtttgctagtttccttgtatttttgagaagctctagatgttacatggaaaattcaaccttgtttctctgttttcatacaaagtggggttcttggaattcttagaaaatggggaggaccctttgcacaggctgaagttgtgtgagaagtctggacagagtttccagctttcaaaatttagtaggggaaaactaaatagaggctttctcccttgtctcaaaactggattttaatttgcacactgctggtatgggtcaggggactgttgtgctgaatcagaggatgtaggatacagggaatcatgaaaataagcattggcccccatgcctaggtgatgagaacatttgtcagtagatgttaaggttcctttataagcttgactattgcttttatttgcataaccaaggaaattagaataagattggggcatccttcatttaccatagataaagacagggattctcttactgtagacccagccctatctgtgcactgcctcctatggggaataatctgagggctaaaatgcatgaccacttgccatggtactaaagtccctcagctggacttcatgccataatcacttcatcccattgggaattcagatccctctaaattaaaatacccctgagatgggtgtaaccttaatccctttatcagcttactctgtaattatcaattaatactttaggagagattaactggcaaaaaatggaaatcaagatggcatttctcctggttttgctcctcctcgttttgttctcctggttttgctcctcattagcagtgtgaccttaattttttaatttctctaggtcctgggttcttcatgtatgcagtgaaggaactaggtgatagaatctttgacctctcttctggttctgttttagtgacagaattcactaaattcacatttctggattcctgactgaaaggggattcataagagccttgcttacttcatggctttcctcattgtgtccatggaactcaggccacatgattgtgggtctagtgaaacaaagagagtgtggccagagaatgaaagccataggaaacctagatagccgcataattacttagttgaaagccttgaacagctgaattccagagatgagtttgcaaaagaggagtatcatatgggatgtcacacttcaacagcagaaaaataggctgatacgatcagaaaggatgccaggccattgtggacatctgccgtgcagaatgacatcaagtggctgtctgaacatagtctgaaatctctctctcttgactttgaagagacccctgggcctcaaacttcaaatctgcaaagatagcactatagccagcaggcctggctttctcatgtcaacatgatgcaaacgtttctgtggatacgggatttggagtcaggaaaactatattccagtgtgacatctagccaaaaacaaagaaaactaacaatgttattgttaactttgagctttcctctactttaagcactgggctaaatgtttcatgtactttctttcattcaaatggtgaccttaggttcttctgtgagtcttcatttctttttcagtaaaaatggagcatatctgctttatctgataatagtaactaacaattaactgaatgcttacttgtgcaccgtgcactagggtaagcactttcgtgcattattatctttgtacaataatcctaagaggtaggtagggatgatgactatttatagacaggaaagctgagttggactaagtgaaataaacagcgatgaataaagtctgtggaagaaaggggattcatattttctatgcttcctgatatccaagtcacccagaaatacaccaaagaagctttcagttttcacacctggctgtatgaatttattccatctcagtgagggccaaatggaagactatttgtacagggctgtgtggattaagggagtgaagtggcaatgagaaacagaattcaagtaatctagagctggatagaaactacttatttaagagagcacttggattccagagtttgagtaaaggctttattgactaacttcctaaagtcaccaagaatatcaataaactaaatttacccctttatttatccttacacctttgtattagtccattctcacactgctacaaataaatacctgagactgagtaatttataaagaaaggaggtttaattggctcatggtactgcaggctgtacaggaagcacagcagcatcttctctgcttctggggaggccttaagaaacttgtaatcatggcagaacgaaagggggaagcaggcacatcttacatggctggagcaggaggaagagatgaagtgggaaggtgatacacacttttaaacaaccagatcttgtaagagctcacttgctacacagtaccaaggaggatggtgttaaaccattcatgagaactccactcccatgatccaaccacctcccaccaggacccacctccagcactggggattacaattgagcttgagatttgggtggggacacagatccaaaccatgtcagccttcttttctgtgttatttttatgtccagccttactgaactttctaagctccaattttttatgatctgaaaaatggggctagtaatagctttaactggctagtggtggtgagtgggaggcaaataggagaattaaataatatagcagacattaaaatattttgtcaatgataaactaatatggatagctattaggcctaatagtgactgtgttgattgctgatttattatttgtcactgatgacaggacaatatctctcttattgagaagaaatgccttccttattttcttcttaaaaagattatcatttgcttattttcttcctcctctgtgaagtaaaactttatcaagaagaattaaacatttaaaaaagatgtgcagtaattggtagggaaggataacgagaagaaaagcagacaactgtctgctgcttagcatatccatgagtgtgttaatttaattagaactgccctgtataaatattaaactcaattcacttttgttatgatcctttgcttttcaaagtattcccagttacagattatctttttcaaattcttctgtgagtttgagggagttaatggaagtaaaacaacccaaattggaatgaactgagagaggttttcatcttatcacactttgcttctttctgttattttcctttgcctagttcctggcccagcggcaaaggaggtgattgattttcagtggttttgcctttcaagatgttggcaatgcaacaacttcccttcagtggaattcccattttgtgtagtattttggggtggaggattgaattgctttacatctccacactcctgattaaatgtgaacccccacctgacgtttccaggtcagtagccaggatgtgggatgtagtgcgggatggttgttttatttgattttccccacaactgtgtgagggcaggatatcattgtccccattttacagttaagagtagagtcagtaaatcacagagccaagcatgtataatttctaacagaaattatgggtttagtacctagattgagattttgatagattcaggataaaggtagtgaaaaaattgcccatggaattggtttgaactgaattcatgagaattatagacttccataggcagaagggatcacttttagagtcttttttcagaatgaggtgagtgaggcagagtcgtgcaagtacagatttggggtcctatctttatttaaatttttgatactttgtttagcatggatatttccattcatttttgtgttttaaatgttgcattaaaaattctgtatctagattaccaattcttttggtacccccttaaattttctgcctgatgcaagtgaggcacttccctcaccctattcccagccctgtatagcaggcacaatgctaggttgtttaccagtcatagccccttatttttcacatgaagaaactggggcctaagatcacaaagccagcaccaataacacatggctcttgactcacagtatcgttctcttcttgctagtggagctaaaataataggagagacaaacgtcaggagattgtaacctcataatagagcctgactaaatgtgccagggaaaaaagtgtagcgtccttaaactgtacaagtcagtttagcaccaaatctttcactcacccagcaagtagaaatagctgcaagttgcagcaggtggaatttagattcggttcaaagaagaattacttgacaatgtgggaagtgaggtgctacattgtttcctagataatggcataaaataagagtgggaaattcaaatcccctgagttgggtgtaaatggtggcaactgtgacaaactggagagagagatcatagtagaaactaagttctatacttaacttgattactagagaagcaatgtcttttctttctttctgggtctcggacacccttttgatttcaggtcaaaatcattttcttgaagtaacgtgaaccccaatatggcatcatcctcttctacctatccatagaacctccttgattctacttctttgttttgtctttgcagctttagtcaacagaggctgttcccacagttcctcatccttccctcagttatctatttctgtagctctgggtcctgaattacagcattttctaaccctttgatttggctctcttctgctctgaaaagcattggctctttcacagttactgtacagtatccccactgtggcattttctgactcccatgctgggccatctcatcccccatcaacaaatcaccttgctaccacatggccttttggtaactgacttttatgtagaataacatacatgtagaatgtgtgagagaacaatgcaggcaggagcctggctttgctctgcactgaatatttagcactagcatagttctctgctgtacaaataggaagtcaataatacttgttgaattaataaatatttatacagtgcaatttaattaattccaagtttggcatcttctaaaattcacataggaattttcaatgtggccaaaagccccacatttcatagcaaaatcatgacttggctaatcagagagataaaagaaagaaagaaagaaaaagctctgccctttgcatgtggcctgataaacaattatgccctccagacaccagggctgtgaattccgcctttttaaacaggcccagagtcagcttatttggagattttcagcaccgtggacagaggcaccaggttactttttatctgtcactccctgaacagcaggatgaagaactactcagtttgggacagggctctcagccactgtggtgaaaatcaccccctttagcagaaggaaatttacttagaccctttttatttcccctttcccttggaaaaattgcattttcagttgtcaaggcacttaggcttctacaagttatttttcaggtgcctggaggatggaaaagggttgccctggaaattgatatcttcttctgagtttggcttaacaggggaaccaccagtgcccttgcggatggctgaggtgtcttttatgctaggtatggctctcttccagataaccaagtgtagacaggagtaggcccagttgttcatggagcattggttttaggacttgacctaaaagctgggtcatactattgccagggcaagaattacaaaagcaggtaaactctgccaagatttttctagtggaacatacacattcatggggatgaatccttcccaaactttcaggttttactgtatttggctgtaaaattcaaaagccagattgactaattctcagtgcctgttaaattcttttaggagcaaagtgatacattgtccccacccctgcctttcctaagaactcattttttcccctactcattagctgtattcaaatgcagagctttgctgatgaacagcaaagtggcttcttgactattgggtctctcactttgtcttctcctggactctgtaagtagccctactttcatttattttctaatctttgatgcctttccttcattttcttgaagcacctttacttttcatagtctgtctctttctttttgccccttttatggccattacacacaaatctgagctggccctcttctcatggcaatagacatcctgggctactttcatgaggaagcttaggacaggagctgatggagattagccaaaatgtcagagttagcctaccctttgacctgggcctggaggtgaggttttcttcttacacttactttggaatgagaaatgagagagtgaagttttcttcctacacttacttcatgtcaatcttctcagtgtctaattgctatgatcagaaattcagagttatcccaggctgggtatttgcataccacaatgagaattgctacaactaatgttgcttgatggaagggcaggagctgaaattttacctgagccaccaattttctcaaaaccttggcctgagagagaattcaagttttacccagaagtatctacattttgttttttacaaaagggctcatgatagagctcagttaccttctgctatccatctgtgccaatctgaactgaatcagagtatcatttccttttttttgcatgtgctggtgtctcctgtgttggccttttagagtctgacacggtatttgggaccctccatgagattggaaggagttccattaagtgatagataaagatgtagccagtagaggccaaaggtactcaaatactttttatttaaccttcttactttttgtccttagggaaactgtagacactttgagactgtttattttatgcttcttttctaggaggtaaagcttttgggggaaggttttatgctttcagaattttcagttaacatttctgctttgtgatggtctcccaatcccatctccttcaatgacagctccaaaatatcaccagttttttatttttcttattcaaccctaagttttattggagaaccttattcctgcttcatggagaaaactggctaggcgtggtggctcatgcctgtaatcccagcactttgagaggccgaggtaggtggatcacctgaggttggaagttcaagactagcctgaccaacatggagaaaccccatctttactaaaaatacaaaaaaaaaaaaaaaatagccaagtgcgcgcgtggtggcacatgcctgtaatcccagctactcgggaggctgaggcaggagaatcacttgaacccaggaggcggaagttctggtgagccaagatcgcgccattgcactccagcctgggcaataagagcgaaactccatctcaaaagaaaaaaaaaaagaaaagaaaagaaaagaaaaagaaaattgatgatattttgtgtgtgtgtgtgtgtgtgtgtgtgtgtgtgtgtgtgtgtgttttagttctccagcccccttagaaagattctttcttccacaccaattctcatttccttttcttcaggtttagagatgacttctctcattcaagaccagttccttctctcctatctttcaggagatttctctataattcattctctctctccacactcaccccaccccactacatgatcttcaacctctccctctctcttctctacttgtcttcattctgtcagcttagaatcatctttcctgtgttcccacctagcaaatatcctttctttgacgccacatctctttagctcccatctttgtttatcttcgctttcttcttcttttttttttccttcgtatccaaatcatcattcattacacaactcattgaaatctgaattatctttcttttcatccaatgaatcatgcctaggtcaatgatttatttttccaccaaacttgctattcttcgagtatttaccatttctgcatgtgacaccactatctatctcagctagctgtctcagaaacgtcacatcttccacacccatcaagctctaattactttcttcctcaacagctctcaatttcctgtcctctctatttctgctaccactgcctatattctgagctttgttgtttcttactatgccactacatcagtctcccaactgatatctctctctctctccctccagccttttttttttttttttttgagatggagtcttgctctgtcgcccagggtggagtgcagtggtgcgatcttggctcactgcaacttctgcctccaggtgattctcctgcctcagcctcccaagtagctgggactacagccaccacgcccggctaatttttgtatttttagtagagacagggtttcgccacattggtcaggctggtctcaaactcctgacctcaggtgatccgcccgcctcagcctcccaacctccagctctcttctagttgtttatcctcctgtatcactagtgtacaccctcactcatattcactgtgtaaaatgcaaagctgacctgattaaaatctgtgttaccttcctatttcctgtggggtaatagtccaatcttctgtataaggctgtccacgatccatctcctgccatttttcctgctttttgttccaaccatcatttaccttgctgttcaccctccacaacacccacagttgctagtggttccctgtatttgatacgctgtttctcatgtttgcggtttgtgggagccttcccctttgccaatattggcatttgcctattttcttagttaactcgtggtcatctgttgaaaatcagctcgatatcatctctccaggaagccctccccgcatttctgcactcactttctccatccgttaccaaggttgaagcaccttcctttctgttggtataaagtaccatgcatatggccactatggccattgcactcatggtactgagttacctgtttttgtattttttttcctcaatgtgcctccatactcagtacatcatttttttctatagtactgggcaaggttcttgacacacatgagctgcttaattaagtttaatgtatttatgacaaatttagagcaggtttgaagaaattcaggcttttccccattaagtaatggtgcaccccattaagtaatggtgcactttgggagaaatgggctgaaaaagttttaacgatagcttttgcagcctatttgccccaattgtgtaaatactaatttaaaaccaaatgacttctagaaagtctgtagtcagtcttcaccattgggagataatgaggcaacatggattttgctgcctctctcttaaataacatgaatctactgtggagacttttaagcctatgatgatattttatatcaaaactgagataaataaaaaatgttcactgacaataatgactatagataaatgctgtcagttgtaaggaagtgtcaatcacagacagacgtcagtggatctgtgagggccacactgaatttttgcatgtgtaaactgtataaaataagattttaaagaatgtcataatcatattcagaaagtggaatgagtgtgcatctgaatggctgcccaatctataacgaatattctatctacagggcaataagcagaaaaggtgatgcagagcagccagccagatactatcatcctcatttctttaacatgtatttctagatccttttttgctcagaacattgttatggcattcctcagaacgcttttagtctctctctttctcttttatacttaaaattctaaaccagattctggtgtagagttctgagattatcactgtgccacagtgccattcaacattcctgggattacatttttctttacaaaaggtagcactttggtattcccctaggaccctcagattctccttttttcttttcattgctgcttaccagaaacaggtgctcctcaacctgtatttgtgcagtattttttgcaataggcaattatatgtacttttagtgataatagttgtttgtacattaacaatagtttcacttttaaaattggtgtattttccccttccgcatatgtgtatgtacacaaaggaatacaaacaaggacagacctgattgttcctttgttataagtaaagaccatctaattataataaagcacaattaataattgtgtgtaatgagcaaattagagcaataatacaagaaaatgagaggcaattccttgaaatgtttctgtcttatcttttaattgaaaaaaaaaaaaaagccttccatttccctcaggtagagtgaaactgacaactgagctgccctgcttctgccaaatatgaagatatctaagactctgcttctctgtttactgggcaaagtcctggagggagagtggggaggggaaaggaagaagtctgttgaacttggggcttagtttcactctggattatgtggcaaattgattttgataacaggcacctccccattcatacctatgttattcttaggattatgcagtaaaatagtttaatagtaaaaggatagaactttggtgttagaaagacctaatttctggtcctgactttgccactttactaatttgtggttttaagaagctacttaagtattccaagatgtagttataggtcacatggtttttgtgacacttaattggatagtgcttacttcaaggcctagcatgtagccagggctccatcaatattctctatgagagaaagaggaggaggaaaagactaaaaagtccgaaggatgatatgatgtagttgaaagaggatgcacttagacacttaaatcctgtattcgtttcttactgtctgtattgtgttgggtaaagcaacttgaactttcaaactcaccattttccaaatctattaaaaaatggataatcatgcttaatatagaacagttctgagaattaggtaagaaaatgtctatgtaagtgcctagtgccacatcttgccattagtaagaaccaagaaatgctatttgtggtgggatgccattgatgttgggtagagcttagctatgatttatgatactcccaagagactttttttttaatcgtgtgaagccatgtgttctattctgctcaacgttctcatcagactcatgattcctaattcttaaagcaaaaaatggggtctgagagtgtttcgtggcatgacagttgtggtcagaacccctcccatattcccttattctcaccaagtcaatgcaacttcgatcaggcatgcatttttctgcctgggggcttgctctttgctaatggatctgctttgtatcctgtgctatagaccagaagtgcagagaaattaatgtcctctttcctcagtgttcatcaaacaatggctggtgttgttttctactggctcctagaccttcctcagtgagctaaaattccattttccctagatagtagctggctcttgccccgtctgtaggtcacatccccgcatcacgttcctaataatctacctgcacttcactcttggtctgaaggtttgcttctgaggaaacccaaactaaggcatggggctactctagtaagccagcccagtgatgtttatggtgaattatcataagtagatctcgataccaggatttgtattatattgtacagaactggttataatagaactagctctagctggtctgaggcttaatatgtagattgaaataaacatgcctgagacctacagattatttttcttttttttttttattatactttaagttctagggtacatgtgcacaacgtgcagatttgatacataggtatacatgtgccatgttggtttgctgcacccatcaactcatcatttacattaggtatttctcttaatgctatccctcccccagccccccacccatgacaggccccagtgtgtgatgttccccggcctgtgtccaagtgaactcaatgttccattctcacctatgagtgagaacatgcagtgtttggttttctgtccttgtgacagtttgctgagaatgatggtttccagcttcatccatgttcctgcaaaggacatgaactcatccttttttatggctgcatagtattccatggtgtatatgtgccacattttcttaatccagtctatcattgatggacatttgggttggttccaagtctttgctattgtgagtagtaccaccataaacatacatgtgcatatgtctttatagtagcatgatttataatcctttgggtatatacccagttatgggattgctgggtccaatcataattctagttctagatccttgaggaattgccacactgtcttccacaatggttgaactaatttacactcccaccaacagtgtaaaagcattcctatttctccacatcctctccagcatcttttgtttcctgactttttaatgattgccattctaactggtgtgagatgctatctcattgtggttttgatttgcatttctctgatgactggtgatgatgagcatttttacatgtgtctattaattggctgcatagatgtcttcttttgagaagtgtctgttcatatctttgcccactttttggtggggttgtttgatttttcttgtgaatttgtttgagttctttgtagattctggatattaaccctttgtcagatgggtaggttgcaaaaattttctcccattctgtaggttgcttgttcactctgatagtagtttcttttgccatgcagaaactgtttggtttaattagatcccatttgcctattttggcttttgttgccattgctttttgtgttttagtcatgaagtccttgcccatgcctatgtactgaatggtattgcctagattttcttctagggtttttatggttttggatctaacatttaagtctttaatccatcttgaattaatttttgtataaggtataaggaagggatccagtttcagctttctacatatggctagccagttttcccagcaccatttattaaatagggaatcctttccccatttcttgtttttgtcaggtttgtcaaagatcagatggttgtagatgtgtagtgttatttctgaggcctctgttctgtttcattggtctgtatatctgttttggtaacagtaccatgctgttttggttactatagccttgtactatagtttgaagtcaggtagcatgatgcttccagctttgttctttttgcttaggattgacttggcaatgcgggctcttttttggttccatatgaactttaaagtagtttttttccaattctgtgaagaaagggtcattggtagcttaatggggatggcattgaatctataaattactttgggcagtatggccattttcacgatattgattcttcctatccatgagcatggaatgtacttccatttgtttgtatcctcttttatttcattgagcagtggtttgtagttctccttgaagaggtacttcacatcccttgtaagttggattcctaggtactttattctctttgtagcaattgtgaatgggagttcactcatgatttggctctcagtttgtctgttaatggtgtataggaatgcttgtgatttttgcacattgattttgtatcctgagactttgctgaagttgcttatcagcttaaggagattttgggctgagacgatggggttttctaaatatgcaatcatgtcatctgcaaatggagacaatttgacttcctcattgtgtaattgaatacagtttatttctttctcctgcctgattgccctggccagaacttccaacactatgttgaatgggagtggtgagagagggcatccctgtcttgtgccagttttcaaagggaatgcttccagtttttgcccattcagtatgatattggctgtgggtttgtcataaatagctcttattattttgagataagttccatcaatacctagtttattgagagtttttagcatgaaaggctgttgaattttgtggaaggccttttctgcatctattgagataatcatgtggtttttattgttggtgctgtttatgtgatggattacgtttattgatttgtgtatcttgaaccagtcttgcatcccagggatgaagctgacttgatcatggtggataagctttttgatgtgctgctggattcagttcgaaagtattttattgaggatttttgcattgatgttcatcagggatattggtctgaaattctgtttttttgttgtgtctctgccaggctttggtatcacgattatgttggcctcataaaatgagttagggagggttccctctttttctattgattggaatagttttagaaggaatgctagcagctcctctttgtacctctggtagaatttggcagtgaatccatctggtcctggactttttttggttggtaggttattaattattgcctcaatttcagagcctgttattggtctattcagagattcaccttcttcctggtttagtcttgggagggtatatgtgtccaggaatttatccatttcttctagattttctagttcatttgcatagaggtgtttatagtattctctgatggtagtttgtatttctgtgggatcaatggtgatatccccttttttttattgcatctatttgattcttctctcttttcttctttattagtcttgctagtgatctatcaattttgttgatcttttcaaaaaaccagcccctggattcattaattttttgaagggttttttgtgtctctttctctttcagttcttccctgatcttacttatctcttgccttctgctaacttttgaatttgtttgctcttgtttctgtcgttcttttaattgtaatgttagggtgtcgattatagatccttcctgctttctcttgtgggcatttagtgtaaatttccctgtacacactgttttaaatgtgtcccagagattctggtatgttgtgtctttgttatcattggtttcaaagaacatctttatttctgccttcattttgttatttacccagtagtcattcaggagcaagttgttcagtttccatgtagttgagtggttttgagtgagtttcttaatcctgagttctaatttgattgcactgtggtctcagagacagtttgttgtgatttctgttcttttacatttgctgaggagtgctttactcccaattatgtggtcaattttggaataagcgcgatgtggtgctgagaagaatgtatattctgttgatgtggggtggagagttctgtagatgtctattagttctgcttgttgcagagctgagttcaagtcctggatatccttgttaatcttctgtcttattgatttgtctaatattggcagtggggttttaaagtctcccattattattgtgtgggagtctaagtctctttgtaggtctcgaaggacttgccttatgaatctgggtgctcctgcattgggtgcatatatatttaggatagttagctcttcttgttgaattgatccctttaccattatataatggccttctttttctcttttgatctttgttggtttaaagtctgttttatcagagactaggattgcaacccctgctttttttttttttttttgctttccatttgcttggtagatcttcctccattcctctattttgagcctatatgcatctttgcacatgagatgggtctcctgaatacagcacactgatggatcttgactctttatccaatttgccagtctgtgtcttttaattgggggcatttagcccatttacatttaagggtaatattgttatgtgtgaatttgattctgtcattatgatattcactggttattttgcccattaattgatgcagtttcttcataccatcaatggtctttacaatttggcatgtttttgcagtggctggtaccagttgtctctttccatgtttagtgcttccttcaggagctcttgtaagacaggtctggtggtgacaaaatctctcagtgtttggttgtctgtaaaggattttatttctccttcacttatgaagcttagtttggctggatatgaaattctgggttgaaaattcttttattttagaatgttgaatattggcctccactctcttctggcttgtaatgtttctgctgagagatctgctgttactctcatgggcttccctttgtgggtaactcggcttttctctctggctacccttaacacttttcccttcatttcaaccttggtgaatctgacaattatgtgtctggggttgctcttcttgaggagtatctttgtgatgttgtctatatttcctgaatttgaatgttggcctgccttgctaggttggggaagttctggataatatcctgaagagtgttttccaacatggttccattctccccatcactttcagggaaaccaatcagacgtagatttggtcttttcacatactcccatatttctttgaggctttgttcatttctttttactcttttttccctaaccttgtcttcttgctttatttcattaatttgatcttcaatcactgataccctttcttccacttgattgaatcagctattgaaacttgtgtatgcatcatgaagttctcgtgccatgattttcagctccatcaggtcatttaaggtcttctctcactgtttgttctagttagccattcatgtaatattttttcaaggttcttagcttccttgcgatgggttctaacatcctcctttagcttggagacgtttgttattaccgaccttctgaagcctacttctgtcaactcgtcaaagtcattctccatccagctttgttccgttgttggtgaggagctgtgatcctttggaggagaagaggcactctgatttttagaattttcagctttcctgctctggtttctccccacctttgtgctttcatcccacctttggtctttgatgttggtgacctacagatggggttttggtgtagatgacctttctgttgatgttgatgctattcttttctgtttgttagttttccttctaacagtctggtccctcagctgcaggtctattggagtttgctggaggtccactcaagaccatgtttgcctgggtatcaccagcagaggctgcagaacagcaaatattgcagaacagcaaatattgcagaacagcaaatactgcaggaaagcaaatattgctgcctgattcttcctctggaagcttcgttccagaggggcagctgcctatatgaggtgtctgtcatcccctactgggaggtgtctcccagttaggctacacgggggtcagggaccaacttgaggaggcagtctgtccattctcagagcccaaacactgtgctgagagaaccactgctctcttcagagctgtcagacagggacgtttaagtctgcacaagttgtctgctgccttttcttcagctgtgccctgcccatagctgatgtggagtgtagaggtggagtctagaggcagtaggccttcttgagctgtggtgggctctgcccagtttgagcttccaggccactttgtttacctactcaagcctcagcaatggcagatgcccctcccccagccaggctgccaccttgcagttcaatctcagactgttgcgctagcagtgagcaaggctctgtgggtgtgtgacccatcgagccaggcacaggagagaatctccttgtctgccagttgctaagaccttgggaaaagtgcagtatttgggcgggagtgtcccgttttttccaggtagtctgtcatggcttcccttggctaggaaagggaaatcccctgaccccttgcacttcctgggtgaggcgatgccccaccctacttcagcttgccctccatgggctacacccactgtctaaccagtcccagtaagatgaaccaggtacctcagttggaaatgcagaaatcacccatcttctgcatcgatcacactgggagctgcagactggagctgttactatttggccatcttggaatacccactccagatttcttttcttaaaataatacctttctaaatacctgttggagtgcttgagttggtaggggctatgggaatgtcatctgactgattttgtcagaggactttgtggatttgagacagggtgggtaggagaggatcatcacattgattccagaactaaacttagggcttgaggtcactttaggtggggtagaagtggggatatctggcatactatgagatttagagggccactgtagcctcataggtactcagactttatagtgttggtttaattagggattttcttaagctggctgccctgattcaaggtgatggttatctgagcaccaggtaaggcctgggaagggtagaggcaatatggctagatgtccatttcctataatctctaaatttgtatgaattgatgcattcatgatctgagatcataaatgaagtccataaagtccataaacctcctgatattttatgtaaaacttaatgcatatgtacacttttctagagaggaagtcttgagcttttggattttaacaggtgtcctcaacatattgaaaactgcttcagcttgatgtccaatttcagtgctaacaattgttgcagaagtgtttttgagcactaatcatatcaattgcaataatggtgctccttggggtctcaggtgagctgagacttggagccttgggatccagaactcacccttaaataagcatagcatctctcttggtgggggtctgtggaggtacagggaggttggagagagttggcattacccaatttagtgaggttaagataaacactgcagagtaatccatggctgacctcagtgatgagttatccattttgcaatctggccttttattacattgctgttgactttgttgttgttgttattgttacatgtttgtttttctttggatatcaatgcttttatgggaattatttctcatttcgttaatcctagcctagtttccttcaaaagggtcttgagtgcaggtagcctcttcagggtagagtaaaacaacaaaaaagtcaaagccggaatcaagggtgtgttttctatcatacagaatattatgatggaccactgaggctcagtgccactagggactctcttgggaggtgcatagaatgaatattaaaactctctgcctgaaagatggaataaggcagaatgtatttactgttcccatttccccttggccaaggattacttcatggggcattaactgtcttacatttccaggtttactcagatgccctgcaggttcccacaggcttcctgcatgctgatagcagaggagccctggggcacaccatgagagatacatgatacagctcaggcaaatgctatcaagttataccaaaggcacctctttgcagcagctggcatgcaaaagtgaacagagaggatatgagggcacaagaggtgtctcatacaccttctccattctagcatctctcctcactgagaccatggtaatcttaacttgtaggcatgcagtgttaataaatgaagccaaagtgctggatttgatccctatgtaggtcacttagctgcccacagtgaaaagtagcaccatggacatcaaagtgaacaaacccctgcctgagtacttatttccatggatcaaaaggatggggaaatgctgatggagagttgaactttataatcgggaaaagtccattcaaatgggctattttattcaattcccaaatagccctagactttatataacttacatggtggaattcatgcttttactaacaagtaagttaaggctcatagaggctgcgtgacttgaccagggtcccatagttaatagactgaaatgtattccttcttacttcaaacttgttcacatcatccagctctctggcaacacattactggaaaagaaaaatagttcagagaaggatgtgctcatgaggactgcatagagttgcaatcttcttgggagggtacacatgcatgacctgccaaatctgaaatattaggaacttttgcttgcaacttgttccatctacagcatgggtagaggtggcaacagagaggtgactggggagaggtttgcccaagagacagcagggagattctgggaataaacaggagttgggttctcaatttggcaactaagcattcttttgttattgcactttctcaggctgcagcagagcctgattagctttaaaattcatttccattggtttcttctttcatgatagttttagatgttgttttattggcattcctatagatgtaatttaaccttggtagtactgatgaactggttgttctcttgtaaattttagaaggaaggtggacagtctgggagaaccagaactgacaggagcaatagggtgcattgctaactggcaccctgtgctctgaggtcaaaaggaaacataggaaggtggtttctgagggcaagacctaggctcctctctcaattctcttttgatttcaaattttgtttcttaatttactttaaacacacacacaaacaactttacataaatgtgtacatatgatttcagtacattttcctaagtgtattcttttctttccatttttgtttgatgtctcccctcttctcctttttgtccatgttggtcccctaactctactccaagatagttcatattaataacctagtataaatcctggcacatttttctctatacacatataatttatacatatagaaatgtatacaagtttttcaggtcattgttttataaaatgggatattatatacttattttgcatcttgattttctttttagaagaacactattgtgcatcatagaataaatacaaaaaagtttaaaacatatttaggtactttaaataataatgaagcaaacatttgtagtatgtctatctacccactgcattaaagaaatagggaattaccagtgccttagaacctgctgtgtgccactttgcaatctctttttcctctttccctcaggaactctactttctggaatcagtcctgtgtttctctttctatattttgcttctgttgctcaacattactttataaaaattttttcatatcaaaaggcagtgctctaattcactctttttaatgggtgcataatattccagtctgatgatatgttatatatgtggtattctccttcctgtaaattataattttatttccatcttacttttttctaccatgcacaatgttgcaataaatatcattgtgtatttgcactggtgcttttatatctggtgcagtccaggaatggggttgataaatagaagaggatatgtattttaaatatgaacaaatactgtcatatggcttttcaaaacattgtaacacttcacatactcaagcaatgtatgagcacacccttttcacacatccctgatagtgatacgaattattgcttttttaaattgtgccagctgagaagtgtaaagtgatatttcattgttattttaatttgcatttctcggactgttagtgaatctgagcatttttgcatttgtttgtaggccatttagctgagcacttctgtaaatgggctattcatgacttcttgtttctacaatggagatatttgtctttttcttgtctttccatagtaatatttgtttaccttgtttagggtatattttgccatcaaatatgttactttttaatgtagttagatgtctgtttttaactttcacatcttctaatttccagtcttcgtagagaatgttttccccgtccccacctttaaaaagtgtgtttagtttttaagattctttttaaatctttgttttcattttttatatttaaatcttaatccatttagaaatttatttttgtgtttatagatgctagaggtccatgtttactttgttcctgatgataatgataataacaatagctaacacttactgctgctatgtggtaagcattgttatataggcactttccacatattgcatcgctgacttggccttgtccctcacaactctgagacataggttttcttaccatatccattttacacttgaggaaaatgaggcacaaaaaaattgagtaattagcccaaaggtcacagaggaggtcaagtggtgaatgtgggatttgaactctgggaatctggcactgaaatccactcttattatagttcctcttatttgttaggccaggactatttatgaaaaaagccactcttttcccactgaattacattacttttcttgtcatttattaaattctcacatataccagagtttatttctcgattgtctgtctgctccctgatcttttcatctattcctagcattttttgttgagttgatgatcatggtcgtataatgtctgatatctatgaagtccagtcttctgtcattgctctttttttttcatttatttttttttgagacggagtctctctctgtcgcccagcctggatgcagtggcgagatctcagctcactgcaagctccccgtcctgggttcatgccattctcctgcctcagcctcccaagcagctgggattacaggcgcccgctaccacattttttttgtatttttagtagagatgggtttttaccattttagccaggatggtctctatctcctgacctcgtgatccaccctcctcggcctcccaatttccaggcattcatacttttatgtataatttatgtttattttattcaattaaagtagccgatgggatcctaattgaagttgtattaaatcaatatgttaattttgggacaattgccatgttcatactaattactccataaatttaaaatatagtatgtttcctcttcattcagaaattaatttatatcttttatatatttatattttctttgtgttgtcttttaaatttttgggggagatgtatttataaatattttaaagcttttgctgatataaatagaaatatttttctcatttctattccttagtgattgttactagagttgagaaaaggtactgattttgtatattttatatataaatcagtaggaagagcactgtcaatctaatatttttaattaattaaacaagaaaaatacattcatgtcattaagggctgaaacagcttttgataaacttcagcaggcattattaatacagttcaggtaaaattgaaataaaagatgattgcttagatatataaagattatttactaaaaacagcaacagatttaacaaacatggagatcattttagttaaaattagaatgcatttagggatgtcccttgttatctatattaaacattgcatttgctatagcctccaaggccataaaacagaaaagtaaaatagttggtgtaaatatcagaagaggtaaaactatctctttttgctgatactataattccttatcaagaaatttaaacaactctagttaaaaacttacagaatgaataagatactttgataagctatctggatataagtatataatatcaatcacttctttattctatcaataattaaccatttttagttctcaaggttcaaatttcagagaaggtggctttgagctataggttggatcatttcccatgacttggacagggagataaaagcttcttaggacggccccactagactctaccaagtggaacaaaggtgattgctcaaatttgagctgaaaggggaaatggatgatagacagaagttttttaaaaaataaactccacatactgtatgtaactgcacttcagaagtcaggtgcctagcttttaagaggataaatctaaattctttgcctgcttcttctagaatccttcccaaacccttttccgttgccccctccctttttacctgttctacactgcatcccaactggttgttacattgtcccctgcacacgttttgcacattcctctgttgtttgcccatccattcccctcactagacgtattctattcctttttctttcatgtaattctgattcgccctgtagggctctctgcacgttcccatcaaatgcttgttccattacccaagaccaggtcccttctcccaaaccacaggggctctaggagcccactctaccaaagacctgaagaacctccagctgtcacagtctcttcactcctaggactgaaggacctgttctcttctccgcatctgttcctgcatccctgtgacatctgccccaacgaaatcagaagaggagaagggaccaggactctcacttcccagactatacattgttcagcttcctctttccccctttctgacatggaaatagcgagcgaagatttgagggccagttttttcatgttgttgttttgggatgttttttggtgtgctgtcatagattttattttttcatttagagaagccaggtccaacctaaacagtttcatactcttaccaagaggatgctttgtccttcactgtttcaagtttgtacaggattcaggaccatgttttgcacctagtaaatgagtcttcgtttatccaaactattttgagttctcacctttatgcctttgctgttgctatgtcatttctcctgaaggcccttctccttctctttgttcacttgattactcttagtttttacatttcagctcaggtgtcaactgctccaagaagcctttctcgagctcatgctccccttcaccaaactgccacaacaacctgtgtgaatcttgatcaccaagcttacagtgctgtttgagataattatctgctcaagtttctggtgttcccattagactgtcagtgcctcatcgatgtgctcagcctctagctgtgaatggtgcacaggtgaccccagtggatattttttgaataaaaaaataaatgtatggatgaactgagcaatgttttgttaccatggatgttggtcatatcatttcatgatttgctatctaattttgccatttctcctctaattccattaccctcccagctcttgtttctctacgtgagcatgttgtgtgaatgctgagtgaacttttagtttactatgcattcatagtgcattcattccagtattcatttcttccttgggtcctggcctactccttccttttctctcatctattcattctaatctcatttgaacatcaagctcctcccactgtcgatactttatcatcattactatcccttttagtaacttagtaaaaaagcacctctaggatctttcaacttactaaagacttttcctagaggaggagacaaatctgattctgcaaactttttttttttttttttttttgagacaggatctcactttgtcacccaggttggagtgcagtagtgcgatcacagcacactgcagcctcaacctccccaggctcaagtgatcctcccacctcagcctcctgagtagctggaacgacagtcatgtgccaccacgcctggctaaattttgtaatttttgtagcgacagggattcagcatatttcccaggctggaattcctggacttaagtgatccacgtgcttctgcctcccacagtgctgggatgatatgctgcaagccactatgcctggctggctctgcaaacttttacttctatgaccctttctttctcttggtttctccttgacacttctccccaatgaacccatggtgcaatatgggagttggtgccctaaaagtgactacctcctaaaatcactcacactcaattattagtaaagttcaaatgacaacttttttatgataattgtgttttaaaagaaaatctgagggatagtaaaaacaaaaaaaaaattcatgccagaatttcaggcaagcaccagttgagaatgtatttttgtgtgagcagggtgttatcagtaaggttcaacatgttctacataagggactggaagctctgcccgggatgtatgagggcaatcttgcctggcctaaaggttggactgtaggtagcacaggacttccgggtttggagatttagaggataagtctaggcttcacccaaataccaacaataagaacttgagtagttcctgggacctccctgagcctaagtataaaatgaggacagcaacacatatctatactgccatgctgttataagaaataaatgagataagaaatataaagccttaggagtcaatacagtgcaatggtggagcatgagtattgcagagtccgattggttgggttcaaactctggacctgacactaattaagggttaatgaccttgtgtaagcttttaatctctgtgtgcctcaatctctctatccatatgataagggatacaagacctttctcatacagtggtttaaagatgagagtaaataatatatgtgagaacacaaatagaagagcatgcatatgaatagcatttaatgctcagttaatgaggctcttatcaaagtgacagagggcctccatgtaatcagagaagggtccacttaaggctctattggcatttgctgaaggatcaagacttgctgtattcctatctatgaatagacctatggaattaaaacccagtacaagcattttttttttctacttatatctatgtatgctctttctctcttgccttcttgataattcagaagcagaactttgtcttattactgacttccagaagaaatttcacaactctcataaagtttgtgatttttgtagactatactgaacatttagtgactcccagggaggatcattttaatcagcatacaatagtttgctcttcctcttcccttccattttcttctttccctttctccccccttctctagttttttaatctcacctcctctccctgcccttttctatcctcctcccctctcatttcccttcctttatttcttctctcatttctactctttccccctttctccttccttctttcctgccctcctcccctccctcctcacctcctcccctttctccttttcccatccctccttccctccttccacttctctctcctctttcatctccctttctatcctccctcttctctcccttccccactctacttccccccattcctccctggagttctccctttttacttttcttcaagtgggcttatcaaagtattttttttaaataaaataaaggcaagtctttctgtaagaaaaaaagtcagaaaaacattttcttctcattataggaccaaaagtgcccttagagatcaagtagcccagtgatccccagactttgcttgttggtcgcgataccctgggcagcatttgaaagccaggccctgcctccagtggtggttctgaatcaaaagatcagtgtagaggcttggagtggcatttgtgtggggtgtgccagaatatatttattttaattcaagaagatttggatttcagtcctaagtctgtcacttgctaatggaaccatcttggctgtgtgctattaaaacttccagagcctcagtaacatttgtaagaatgtggaaaataatatcttcctcaaataacaagcagtgatcagcagattggctggcacatagtaggtgttaaaaattgtttcttttcttccttccttttgagtatggtacagaatcctggttatctctctcaacacacaggatggtgataaaggaaagcctgagtatttctgtgccttgtagcacatcttagaaagggagaagggctattcagcagcattgttcatgctcaggcccaggcccagctgcctctaactgtggtcatgagaagtctcagacactggcatgaagtcagcaaataaaaataaacaacatagccaagtatgatggtgcacgcctgtagccccagctactcaggaggctgaagcaggaggattgctggagcccaggagtttgaggctgcagtgacctgtgatcacaccagtgcactccagtatgggcaacagggaaaaatctctgtctccaataaataaataaataaataagtagtaattagaaataaataaacaacatttttgaggagaagggatgaagttgattaatgggtacaaatacaccgtttgatggaataagacctagtgttagatcagtaaggtgactatagcctataataatctattgtacccttcaaaatagctagaagagaataatttgaatgtttctagcattaagaaaatattaagataaacatttaagtgatggatatcctaagtatactgatttgacctttataaattatatcaatgtattaaattatcacatatatcttgaaactatgtacatctattatacatcaataaaaaataatttaaaaccccatttattgtgaattcactttcccaggactattttaattaatcatcataacaaccttatgaagtaaatgctatgattatctttaaccacattgacttggtaaaatgtctgtaggcagagcttttttatttttttgaattttggctactatttgcatgtctgtatcatttacgccgtcctttgtctgtgtttcttagatcccaaataagtactgaggggtcctatattcatttcaaccatactgtattgagtacctaatataaaaaatccagcctctagtttgaggagctgaaagaatgaaccctatgcagtcctgattgtctgggcttattttcacttgctctgtgaagcacctgagcccttgttggtgaaccctgctacagtccccactgagtttaagacccactcttttcaagggtccccatgttaggtttgcctccacaccttagcttccaaagctttgttcccccctgccaatggggcactctagccccatccacccatcccctctcagagttgtagaaaaggcttctatcagcaagaatccagagaggttattcatacatgggacacttgatagtggttcttattctttgaggaggaggaatacttctgatttaatggtaacgaagttctaattttggtaagtccggggatctgaggctagagctgctttgtcacaagtcttgtttgcatatgctgtgtatttctacccataccctcatccaacttatctaaatcttgctcctttttttccattcttgctgatttaattttatccctcaactcatggttccaaataatcccctgtgttagttgtgcctacagcaacttgtttaactctctctaccaggcaataaggtggaggggcaggggaaggataaatgcagcctacttgtgatttatcacagttggaaagaaaagggaaaagacatgcataacactttttaaaaaagaaccagagaggcagagagagaagagtgtgtggagggagatgaagggtgcactctgatgggaacagatggcccaaaaggtaagtgggtggcagagagtaaaaataaccagggagtgaccaagccttcattttctttgaaacactcacactttagggatatattgaaactgctaattttgttggcactttgacacctcctcctaattaatgagaaatttattaggaggatgactgaggtgagcaagctgcttacaaagagagaagggagagaatacattgaacctattcagcttggcggtcacgaccaagcgaggtgccattggatatgtggttacttgtgggtgagctcaagtagaagcctcgggctgggctcctctcctggggtggaacccttctgctgggctcctttcctcctggctccctgtactcactgctgctctctggtttaccagcatagaggcacaaccccaaaacaggcttcgtggggaccaaattggcttttggatctcaagtgtgtctctgagtcactccagtgaacacgttataggtcactctgtgcaggttagtggcccgaaaatctgcccttcaaaggaaaagaaaagtgaaattctcatgacttttacactttttgtcaaatcttctgcatagagaccttctgagttggctctacctagtctgtgattccaaatctcaagcaccacctgcaattgtccatatttttcacccacaggatgctcatgttaccaggaacttaaaagagtaaacgtggttgctgacattttagcgttcgtgggccagttttctgagatcaacactaggcaaggtactggggagtgtcttctaacacttttcagactttgaacagctaactccattttctgggagagcagggttacttgacaggtatctaaatcctctgtcctagccatccaccaagccacccatttgcccttccaaatcccttatgcagttcattatctgtgcaacatagaacagtcgagagcatgggctctggaggcccattgggagcttattcactcctctgctctgccattcatcagcttgagttgtcttaggcaagtcacataccatcctctgtgtctctatttctccctctgtaaaatgagatcactaatggcattcactaacggatggttgtgagagttaatgaggtaacagttataaagaggttagtactgtgcttggtataaactaagcacaaaataaatagcactatgacatttaacactataacatttaactttcaaaatgatttcatatgcaattttgtggcagtgtcttcatacattgggtagtacagagttttaaagattatcctttaataaatggaaaaattgagtcatgtaatggattagagactttcccaaggtttacaactacagaggaatagaattggctctagagctaagtcttctcattctagtttaattgtttgtttatttgtttctatgcaaacatgttcatactcttccttagcatgtttcatcctatctctactagtgcaacaagatgctgagaagagggaagaatgccacaaaactgcatacaccaaagatgtgtggctcaaaggatacaacttttgacttgaacagtcaccaggccttgtgatcttgaacaaatcattctgcctgtctaaacattaattaattcctcaacttttaaatggaatatgatgactatttccctttatatgtgtatcttagatgtaggcatggagctaaaatagaaactcaaaatgaagtaacagtaagggctggcagtggaatattattgatcccagaggaaaataaaaattttatttccaacgttgtgccaagatggtggcaagggtggggaaaccatgtgtcctagaagaagaaaacagaagaggttaagttacctctttattcttttgtttttcagattcaaaggttgtctttttaacaaaatgaataatgcaggtggtgattatggaaagatgttaaattttgatgatgttgaaatgtgagattggtatcctgtgtgtgaggagctcttgtctcctttttcaaaggcaaggttcctatgtgtgcactttcacagaccagccctgcccctgttgcctggaatctcccttctagcacaggctgctgctgaagaggtggttcagaccattttccaaggcaaatccaaagaaaataatggtttccattggttctccttattcttcagccttcccagcttcccccacccctactccagtcttcatgacatcactaattcatacatctattatgcaactcatgccaagaggctggttaaattggaaattgctctttgttaaataatactggtatagatggcatttccattttaatccaaagctcttgagattccaaaatccttcaaaactcaactaaatttcaaaaggtgtaaatcaagcactgcattttactgactctaaaggaaacgtttatgtgagagtagacctccctggagcttcttaaactagccaatgttaatcttggtgctgagacatattgatggtatgtcatatgtaataggttaccaaataataatgcatatactaaaattatgctaaagatttactaaaaatttaaattaaggcagatcaggcttatggctaaaataacatcatttccatgcacctgcattctgacatgctctctggagattctttgctatgggagtgtgccttgtgtataaatagcatttatgatgttggttgcactagaaaaaggaaagttatcaactttaagctccactgaattaacaaatacctgatctccatttttgtagaccatcaagaaatagcattgtgatcattgggcttctccctagcagttgatggtaaaaaaaaaatacatctaggagacctctcctctcctctcttctcctctcctctcccctcttctcctctcctctcccctccccctcccccttcccctcctcctcccctgcctgtcccctccttctcccctccccctcccctcccctccctcccttcccttctcccttcccttctctcttctcttccctctctcctcccctccccttccctctcctcccctctccgctccctcttctcttttctgagaccgggacttgctctgccacccaggctgcagtgcatgatcatggctgaatgtagccttaacttcccaggctcaagaaatcttcccacctcagcttcctgagtagctaggaccacaggtgaaaatgatcacacctggctatatttttttctatttttttttttttgtagagatgcagtctccccatgttgctcaggctggtctcgaactcctggctcaagcaatcttcctgccttggcctctcaaagtactgggatcacaggttcaagccactgtgcctggctgagatctctatctttaatattcctcttccctcctgcttaattgaatgaggaaggggcagtgtcatacaatggaaggagcatagtaactctaacattaataggttgtgtggccttgaacaattcactcaactgctctgaactttagtgtgtcatccataaaatggagctaacagtgactagtttgttttgagaatgagaaccaagatgcgtaaagttcctgacacaaagccaggtgcctagtggcctttagttcttatgacagctgcaggactacctttgtcactgtgcttttacgtctcctccagtgcctggtaagaagagtttatgtatatttcacctgtgtgagtacaaggcccaacttctaactgttaataagagacaactttgcctccctcacagctggtacttaaagcgtcaaagaatatctacactccagatacttgttaagataattcagtcagaatcgactgcaatctagcacctgccagaggcttgctgaaggcatctgttacttatttattgagcacatgattatataactcttgtttactgtacacccagcactgttctaggagtcttaagaatattaacttatttaattctcacaacaaacctgtgatataggtactatcatccccattttacagttgagagaactgaggcacagagagggtaagtaacttccccaagatgacagagctagtaagtggtagagcagcatttgaacctagatggtttggctccagagtttgggaccttcacaactatactatgtaagaaagactggctaatcgttatgttcaccagccattcttccagattcatccagttctttctctgagcttagtgaaattatcagaaaacaagagacccaaacatgtgacttcagcactcccttcccccttccaacagcttcatgaccatccttcagttcctgagtcacctttctagatggatattctgtgtcttcgacaaactcctggtaggaattgtcttccatgttatccaacagttctaacatgaaaacccatgtattaaagtatctaaacaaagtgtgtttctgcataggacctttccagctttatttgctatgaaatgaaaatgatgaagtctgttagttccctttctatgaatattttcattgctattactctggctaacttctgtgctcaggtgtagtctccagttctgcctagatagttgctgatatttactttctctacttcctttagggggcatcttttctgtttttatccctgatggttctgttttcttattgattaatctcatataatgcctctgaatctgttggatgcagggaaagtataaaccataatccaataagcagcttatgatgattttcttaccatgtaaaatgtttcaaggtgtgtggactaaagtagaaggagatgaaaaaaataatgataaattatatcatctattatggatagctaccatttgctcattgcttactttgtactggcactgtgctaagtgcattacctacattattgtttcttaatcctcatggacatggctaataaatgacagggctctaattcaaaaccaggtctttctgacatcaatgcctgtccttgtaaactacactgtatatgaatttggctcagacacatatctcacattttgccctagtgaaacaaagtgtattttctccttttgaccttgggtgaagagagttgaatacaagtctttccatttgtaacacactgtcatcagtagcacaaggcctccctggttttatttatttttcccttcatccctaattatatcttcaatggcctttccctagagatacccattacaatagcttttatatatatctttaaaaatgcatatacccttgtaagatatgtaacatgcttttcttgttatttatttaaaatttattttactggcagcatgctgtatatcttaatgcatttttttaccttttccattcaacactgtttataagatctttcatgttgctatgttttcatttagttggttttctgtaactgctgcatagcatttctctgtatgcatccaccacatctttgcatctgttcctctagtgctaaaactctgcttcaattccacaattaccaatagtgtggtgtgtggccctgagcaaaaattgcttggggatatattcccaaaagtggtgttcctgagttatagggcaaataatgcttaatcacaccaaatactttcagattgctttccagaagggctgtaccagttcagattaccaccagccatgcacaagaaaaatttctaaactgtctctattcttgacaatacttggcattatcacctttgtactcattgccatttgacacgtataaaattgtatttcataagtaaagttcttctgcaagtttggaaaaagttgatttggacttgaacatgccactaaggctgcttaaaatgtcttagatgggatgctgattgagtgaatgcagaggcagaggaggagcaggctctcatttgagccctccttgcaattggtttatgtgtctcttatgacaactaacattgttttgcaatatgcagtgattatttgtgtacttgtctgcagcgagcaccttttggattgtaaattgcatctttcttccttacctgtgtatgccctcaatgctttgcttgttgcaagactccagtaagtgttttctgaaataaattgtctgatctctcgaaggtcctgcctgacaataaggggccattggctatgaaagggtggtaggatctaggagtggaaagtcacagatgattattttctattctaatagggtgatcggtttatttttttcttttcttgactgttttcctccctactttaaccagaggtgcttgcattaggatagatgaactatatgaaactgctctggtaaaaccaaacttttgaacatactggatttttccccctaaattgacaactaaaaatcatgccatgctattgactcattgtcctcttcagtaatcttctggttgggattgggaagggaaatttccagaactacaaacacttctcttagggactcaggtcccaaccttgctgggcagagtgcatgatgtgtttcataatgcatgagtgtttatttaacaaacagcaacactttttaattaaactgttgttgaagatacagactgtataacctttctccaaggcctggatgctcactggcccttccaagatgctgacccctcgctagctgcaggcctctggggcagtacatgctgtgagagttattacaagccagctggattagagggccacctctcttgaatcattcagaagctgaagtgcaggctctgggatggagagtttctcaatatgccaaagctattggaatgcaggcaggtctggagacacttagctggaacctgggggaaaagagtgttcaagataacttcatagaggaaattccctaccgcttttggctttaaaggataatcattggttcttgctggtcttgtactactatttcctgagctactctgaaatagaattgcttttaggtttcaggtcttcatttatagagctatatccctaaaagattagatacgtctcagggatgtttttcaggatgctttttcgcatcatggtgattgtattagtcaggttagacttgattatgctgcagtaatacattacttcccaaattttagtgacttagaacagcatagctttacttcttattcatattacatgtttaacactgggtaacagtggggctatgcttatcttggacgttcagggacctatacgctcagaagcttggctgctttttgatgtgaccatctcgacatgagtctttagggttttctacagcagagaaagaacaagaaataaattgtctcttaaatgttcttaccattttcattggccaaagcaggtcacatgatcatgcttacctataactttgtagagaactgtaatttttctgtcttctcagagagaaaagaggactggaaatgacagagaatatgaataacatataccacagtttcattgggcatgagaaaatggtgatactttgatagatctcagaaaattacatacactcagcaccatatacatgcccttgaagagaagagaccatagactcttaaaaatgtaagtatctcagaggagattttggccagtgaatccaaattatacagcttggaagtctacaggtttatgccataggggacacagaggggaaaatgaggaactaagatgggaatcttgcccacacatctccttcaaacagggcagtataggaaagcatatacttccaaaatgatatgattttcagtcctactctacctcgaacactcttcctggaacatactccaatttgtcatcggctcctcttaaattcagcactcagtcatgaaaatgttctttcatacctggtctcatcagtgtagaggccagaagacctgttggttttccttgctttggatttgttattttggcaattaacgtttctgacaatcatactatacctttgactcattataagcctcatgtgggtttctctactccaaggaggcataggagtttaaaataggaaaacagtagtacgttgtgatggattgtatttttcaaagaaagtcacaataatatttcccatcccatgcactcttctgcaatgtatccttgacattctgtcatcaagattaagaggtagactctctctctaccctcttgaatgtggataggccctatgatggcttcgatcaataaaatatggtggtttaacgctgaggcaggtggggcacgatgtctcacgcctgtaatcccagcactttgggaggccgaggtgggtggatcatgaggtcaggagattgagaacatcctggccaacatgatgaaacccagtctttactaaaaatacaaaaattagtcaggtgtggtggcacacccctgtagtcccggctactcaggaggctgaggcagaggaatcgcttgaacccagaaggcggaggtttcagtgacccaagatcgcgccactgcactccagcctggtgacagagtgagacttatatctcaaaaaaaaaaaaaaaaaaaaaaaaagtgctgaggcagtgaggcagctctggaaatagcccttaactggcttggcagcttctgttttctgactcttagaagccagttgccatgtaagtaatgtgactaccaaaaaatgaccacactgtgagaagcccaagtgtggtggagaggccttggggaaagagataacccatgaggcaagaaagaggcccaggaggtcccaggcatgggaatgaagaaaccagcttgcacatcctgcccaggctacaatggactgtaaccacatgagaggttccaagattaaaccactcaattgaccccagccaactcatagcaccatgagaaataacattgttttaagccactatattttggaatagttttcttaaaaatataaagtgatagataaccataatagaaatttgtgctagaggaaaatccttaagactcttgaaagccattttgtctaacaaagagtgtaaataagatatggccttaacgatcctaagtaatttttctagttaagaaataactgtaatcagttgagtgtttttccactttatgtgacttcagttgaggctgcaatcatttggtgtctggatgagatgggacatccaaggtacctcattcacataaatagctggcagttgatgagataactcagccagagagaacctatgcatgatctctccatgtgaccaaggcttctcacaggatggcaactgggttccaagaagggctatctgaagaaaaactattcttagaaaaccaggcagaaaaaataaaatttcttatgacctagcttcaggagtcattcattgtcacttttgctatattttgttgatcaaaagcaaggcaaagggctctccaatattcatcgattaggggactacacaaagggaaatattaggagtcatggtttattggggggctatctttggagacaagctaccttgatggatagagaaatgataacggaaataggtttgatgaaaaacgtggttaatctgaattgcagtaggtctgatggttggttggcaagttgtccttattctggtgtatgggtgaagggaataagcagtgagttagctcttacctagatccatcccctagaaagtaactgtgtccagttatcaatgggcagggcttgctgggcgttaagcacaggtaacctctagtcttttactatgtttctgcgacagtggcataaaacagctttttaatgagacctactgagatgcactgacagatctcttcctttccttttgtgtctagcccatccaccttcatgtaaatgatttatcaagaaataagacctaggattttgagatgggtacataagagcaaaagagaactaggatgagatcattctcttttgcctgcccttcagcattctcaatgcaagcaggttggggttctaaaggaagagcagggatgactggaaccctatagcagtgagtctgaggaatgggatcatgggggacccagaaggaggaagcagaactggaagatgtttccattctgtgaaagtggcttttggctttgaggcagcaacagtaatatttcatgtcttccgtggtgtctcctacctttaaatgtcagtctctgcagctgccttatctcctgtagcacatttcaattaggtattccaaattatactcttttcttccaggacaaatatgccagaggtgatatttactgttacagcagcatttaaaatacttagggggaaaaaatcctagtgaatagcaatttctcccttataataataataaagcacaataataatggagagaggaggtgaattctggctttgatgccaataactggctgacttaaagtgaacatcttttgtctccgccctcttttgtccccctcctcctattcccgcctcagtgtgaaggttatagtgtttggctctgtcaagagcaacctcacacatcttcttcactggaggctcacaaatgctcctcagaatgtctatttaactatctctaggtaggactgggctctgactgggctcctacttcacccattacctgtttcttcctttgtcctgagaatgtttgcatgaagccagaatctctgtttgtttagaaatttaccaggcaccactgcttactcctcacctatgggacattgtaggtcctgatggaacaccccggcctcctctctaggaggtatatgggttagaaacttatgtattgtacctttccttcttggaatcaagtccttggcctggtaatgaaggtccttcgatctggtctgcattttccagctccatctcctactaatctttatatccttatctactgtttccctaggctgttgtcttcacggccgccatggtaggttttgcctatcatcccaaaccttgtgcaggcctaccacagtacttgacatatggtgggggtctcagtcagtattctcccctatatttagaacccttccactagatcttgtcttcatatttttgattcctgctcagggatcagattatgttccatgtcctccactgagccttttctgacctcctcagcgcactcagtgccgttccctctctgaatttctaaagtgctcagcagcagcagcactcatttggcacttggtatatactatcttatgctattttgtatgaccatatgttgtctatacaactacattataagcacctgatagggataactgtgccctgtgtgtttttcctatccctttgattctaagatagttccttgaacattgaagatgctcagttaatattcatttattaagtagatagatcaaggagtaaatgaaagcaaggatcctaagaagcctgccttttggtgccaatctattcaatttggaattcacaaacttacctaaaacaaggcctttcaatttcctgtttcccctgtaaacagagctctaccaccaggatttctcagaagctctttctccacactgaaccctaaaactgaaggttcaggtagagagcttttccagtgtgagagaatttttaaagcatctggggtttggcacatccagtgctttgaaaatcaaggtgtcttgatcattgggtgaaggggattagaacagcaggctgtgttttcaagttcaagtccataagcagacaggaatagaatcccacaagagtttgttctgtctctgccatttactagttaatctctctatgcctcaatttccccatttgtaaaatggatttaataatggctgtctaccttataaggttgctatgaggtgccagtgtgataataaacgtaaaagtactttgaatattgcaaaacactgtatgaatgtcaggaattaggcaggcaacaactatttcttgggggtttgttctgcatgtagccctgcactatgtgtagatagaggcctctgtacattacagaagactggcagaggcattggggattcatcatggctggaattctggttctcagatagatgaaagctggaaaaagtattatagcctagcaatcacatctgaaaggttggcagcaacaattgagtcagagaagacgggaggtgaagtattggcaaaaatttgaccctggtcattctttgaacacttcagatttccacagattctatccctttaacatttctgaacgttatgattttgcttcctccccacactggcagctctgcctcaatgaaaccgtgttgcttttttggttgatcaattgtgcccaacttcctgatcatacttgtcctgagagcctgtgttaagctcatgccggctctcccaccccgcccccaacgccggccaaaaaaaagactctctaaaaacaggtgcccccgatgatctcacactgctgctggcattggcagcagcccagaagggccaaatggtgacttcaggtccagggaggctactgtcctcagctctgttttcatgtaaatgtcgctcctgctgaaaggaagtggatgcaaaaaaatatctgctatggaagcagaactaccccagactaaaatgttggtttttttttttttctctcccccttttcttttccttcaagttttccatgtggcatcagcagctgagtaagggaaagctaagaggtttaagtgtgctggggctgggtgggctagattaataacccaaagccttccaagctggcggtgctgggtgagacaggccaaccagaaagcgttaggttatggggagccctggccacagagccagaccctaccagggtggaaggtgaaggagcagcgagctctgcgtgcttgccccgagcccccaccttccttccttcctcctccctctggtttctttcctcccattttatcgagtccctctgagatggctgcgcaccagtggctccagcctctgaccgttgctgccctctgctgggaagaaagctttactcggtgtggaaagtgctaagctctaccagggaccagcttaatgcagaccaagtccacagtctgtggctagtgtgtgatttggcccagaggaaggaaggacaattcagaaaacccttgcaccacagtgtttccctagtggtttcaggtgggggcaggactttggaatctattagggaaggattgcttgaatcctcagagttctctgttcaagaggaacatccctgggagaggagcctcctggctcctctttacctgggtcagacatgatgtatggagactccaccatggatgacccttaaatatgatggatggctttagttacaggacacaattctttctcaagggaaggtgaccaaaagaagttgggtcttgaaggggctgcaggatgggcctggaagtctcttggctctaaaggaaccatcatagaatggggattctgagcaaccaggaagcagcagaaaaatatgcaaagccagatgggagtggggaatattgcccattaatgggcaagagtacatagaaaggtagataataaactggcttcaccacttctcaactttccccagagctggctgtgccagtaaactgtgctcagctggctttggatgagagaaggacaagagggtgcctatctccagcatggctgtggggtcgccctgctccatctctggatcttcagcctagagtgcagcccagccaaacaagagcgatgacctcactgaccacatgtaattctgcttgagggatttattttcttccatgagctcctgccaagactcttggttaaagctaatggggctcccccagccagtgagtgtctcctagttatatgtgtaaacaacgccaggcaggaaataggtttcctgttcttaatgggcttgttaaacctcttatcgagtggggtttaaatggctttattatgaataataataatagtaaataaacattattattattagtagtagaaaaattatgatgtcagccctgactaccccttctcattttaatcttgccaacgtggaggtctttggcctctaagtgcacaggaatatggtgagtgacactgggacttataactggagaagatggcagaattcatcttcgttgcctgcagctttccaatcctgagcccttttccactttcatcgtgtttccatctccatcattcctttcattcagggttttcatgatcttattctatcagagaagatagaactacacatccctctccttctcagttttatttagcattgaaagccatggacagaggttctgaggttaaattgaggtatcgggtagaggggattttggagagagcagtggatgctggtaggggagctcagttggaagtggggctcatgttctgatcttcagtgccgaatgtctgtgtccctccctcagatttacatgttgaaacgtaatcaccaatgtgatggtattaggaggggggccttttgggaggttagtaagtcatgagtgctttgggattagtgctcttataaaataggcccaagggagcttgttcaccccttccaccatggaaagacagaagaagaactagaagccaccatctatgaaccaggaggtagccctcacctgatgccaaatcttccagcaccttaatcttggacttccaagcccccagaattgtcagatacaaatttttgttgtttataagctacccagtttatggcattttgttgtagccacctgaacagattgagatatccagtttatagctggaactggaggtataccaggtatcccagactttggtaatttatgtatcaggttcactattttcaccataactccctacaacagtattgattttctttacaccgattatcttgtttgacttaagtagatttggcatcatcttacaagcaatatgtctttgaaatcctgggttcaatgtgttagccaggttttttactgactgcatattgaaatgaatatctaagagctaaatattttttcctaaagttcatcatgtggcaaatgtgtcacaccctccagggaaaacataccacaacatctggagacactgctatagggtagtggttcttaaactttagtgggcatgagaaacactggcagagcttctaccagaaacactggtagatagctgtgctcttccccagagaatctgattcagcaggtctgtggtgggaaatatgactttgcaggttttttttttttttttttttttttgagacagggtctcattctgtcacccaggctggagtgcagtggcgcggtcttggctcactgccagctctgcctcccaggttcacaccattcttctgcctcagcctcctgagtagctgggactacaggcgccagccaccacgcctggctaattttttgtatttttagtagagatggggtttcaccgtgttagccaggatggtctcgatctcctgatctcaggtgatcttcccgcctcggcctcccaaagtgctgggattgcaggcatgagccactgtgcccggccttttctttattttttgagacagagtctcattctgtcacccaggctggagtgcagcagcgtggtctcggctcactgcaagctccgcctcccgggttcacgccattctcctgcctcagccttctgagtagctgggactacaggtgcccactaccacgcccagctaattttttgtatttttagtagagacggggtttcaccatgttagcaagggtggtctcaatctcctgacctcgtgatccacccatctcggcctcccaaagtgctgggattacaggggtgagccaccgcgtccggccgccttttatttttttttgagatggagtctccctctgtcacccaggctggagtgcagtggcacaatctcagctcactgcaacctccaccttctgggttcaagcaattctgcttcagccttcaagtagctgagactacaggcacccgcccccacacccagctaatttttgtatttttagtagagatggggtttgaccatgctggccaggctggtctcaaactcctgatctcaagtgatctacccgcctcggcctcccaaagtgtccagaactcctagactcaagcgatcctcctgcctcagcctcctgagtagctgcgactacgggcttgcacccggaaactgcagttctaacagttgctcaagagatgttgatatccaggggccacactggcagtggcactggcctggagaataagggcctgttctccatttccacatgtgaaaatttcctcatttgaaaatggggataatgtgtgctgtataaaatgaaataattttttcttggtgccaatctgtctatgcaatggaatgtttgtgtctccccaaaattcacatgtggaagccctaactgccaatgtgatattaggagatagagcctttgggaggtaattagatcataagggtgaggtccttagaatgaaatccatgcccttagaaaaaggaccccagagagttccctcaccctctttctgccatgtcaggatacaatgagaagtaagaagtctgcagtacagaagagggctatcaccagaagctgaccatgctggcaccataatcttagacttccagaatgcagtactgtgagaaataaatttctattgtttataagccacccagtctatggtacttagttatagaagcccagatggagtaagccaacctgtttggagtgtttttgagctgtcatgcttttcaggttcagcttaaagctcagatgggaaatacaggaacttctgcaggttaattctggttctaagttcaagtcctaagaataagcccattatgcaattctgggtggccaagcagttctccagcagcccccaggaagtattctatctcacagaatcctggcaaaaggagacagtcttctcagtctggtcaagggctatgttgagtgtgagggaacagaggtgaatgtcccttgctgtgctcaccatgttctgagagacaggcagacaaagcgtaatttacaatttgattaagtgattgcattggtgactttttaaagccgcccagtagttgagccccctttctgcatttggaagtttacccgtatgagtctaaaagggagacagggccctcattccatgactgaggcccccaaagtctagtctcactttcctcagtctcagtgagccacagaagccaggctcagtgtctgggaggagaaatcctctctgatggtggcaggggtggggacagcagccccgctgggccctgtggggacagtcccagcagcagacagtcccagttgggcttatcctgtgatgttggcctcactgtcttggcagcctctggcatttctgttctctgttcatcttccacatatggttctcaggttcactcatcaaatcccttcccatttcacccaatcaataatgctgaactaataatggtttttagagcagggaagtggcacaatcacaacttattttaaagataactgaccactctctggagcatggattggaggatgagtgactcaaggtggggtgactagtgaggaggtgatgaaggagatgagaggaaagaggaagaaacactcacagagtaaacctggccatatctaatgactggaagcctgagtttctcttcaaactcagaagagaaaaatgaatttatggttttgggcgcagctttagttttgtctttggggatgagtatgtattttgttgggaaggtggatgccctgaagcagggttgggaaacaagattagaggtttttgaataagactgtgtttgaatacagcttggctatggtcttctccatttcaagtctgttcaacttaacaaatattgagcccttactaggtgtcagacattcttgggtatttagaatacagtatattttgattttggtgttgaaaaaggtgtggaggtatgcagggaaaaatctcacatgcttttacctacacacacacacattcacgcaacacaaagtgcacgcacatattggtcttgaaattccccaaggaccaaaatggacccatgtgatgagtctgtgttataacagggaatctaccgtaggttcttggctaccttttgtgaaccttctgtcttctttcctctcacttacaagtaatcccctgagtttttacctcctgaaccctgtgatttcaagggttcacaactaaatgcttcttatgctgagcaaatgtatacactgctaaaaccatatactcactccttgtggtgtgtttgttaggaagctgccacttctgtcttctccattctttggaaaaggctgtgagtaaacacagagcactggctatttacatacctagctcctgcttgctttttcaaagctctttgttcaagtgtcagtgctggtttgtaaaacatgaacagagttggggtaaaaaaagtaattacagttcaaatctggtgtttctactgacatgatactgagctgcctgactgctcttctttcttatcccttctctagttctgtcttttcagttgcaagttcactctgtctctgtctcccctctctctcccttgctctcactctcattctcttgcttgctcttctgtgtgtcagaaagctacacacatgaaaggtagctggcctcatagccactgggtagcccatccttgagagcctggccaccttcagtgtgtcgagatgccagggccctctatggctttttgcacagggaagttctagtgttttcagtttccagagcccacaatgagctgtcctccaaatccagatctaaaaccaaaccttctcttggatcagaccaatccagaagcactctatagtttcaggggtgtccaatcttttgacttccctgggccacagtggaagaagaagaattgtcttaggccacacatataatacactaacactgagatatagagtaagctcagttgttgacatagcaagtttgaaattacagcagaacttccagaaaacatcacaccagagttttctatccttccaactatattttacattttttgctttcagaggctatgcttcttcttctttgttcttctcttaattcagcccatgagcacatggtagattatgaatggatgctttaggaaccatgtagatggaggtttgtgaaaatttccacggaacatggcagttgagaattggtgactgatatggtctagctctgtgtccctacccaaatctcaccttgaattgtaataatccccatgtatcaagggtgagactaggtggagacaattaaaaaatgggattggtttctgccattctgttctcgtgatagtgagtgagttctcacaagatccgatggtataagggggtataagaggctaccccttttgcttggcactcattctctatcctactgccccgtgaagagatgccttctgccatgattgtaagtttcctgaggtctcaccagccatgcagaactgtgagccagttgaaccacttttctttataaattacccagtctcagttacttcctcatagcagcatgagaacagactcatgctggtaccacagagagtagagttctgctataaagatacccaaaaatgtgaaagtgactttggaactaggtaacaggcagaggttggaacatgttggagagctcagaagaaagaagacaggaagatgtgggaaagtttggaacttcctagagtcttgttgaatggctttgaccagaatgctaatagtgatataaacaatgaagtcctcagatggggatgaggaacttggtgggaactggaataaaagtaattcttgctatactttagcaaacagactaaatttgcatttcacccctgccctagacatctatggaactttgaacttgagagagatgatttaaggtatctggtggaagaaatttctaagcagcaaatcattcaagaggtgacttgggtgttcttaaaagcattcagttatatgtattcacaaagatatggtttggaattggaacttatatttaaaaggtaagcagagcataaaagtttgggaaatttgcagcctgacgatgcgatagaaaagaaaaacccattttctgaggaaaagttcaagtcagctgaagaaatttgcataagtaatgaggagccaaatgttaatcaccaagacagtggggaaaacgtatccaagatattcagagatcttcatggcagtccctcccattacaggactagaggccaaggaggaaaaaatggtttcatggattgggcccagggccttgctgctttgtgcagtctcagaacttggtgctctgcatcccagctgtggctaaaaggggccaatgtagagctcaggccattgcttcagagggtacaagccccaagccttggcagcttacatgtggtgttgggcctgtgggtgcacagaagtcaagaatttaggtttggtaacctccacctagattttagcagatgtatgggaatgcctggatatccaggcagaagtttgctgcaggggcgaagcccctatggcgaacctctgctagggcagtgcagaagggaaatgtggggtctgagctcccacacagagtccccactggggcactgcctagtgaagctgtgagtagaggactagcatcctccagacttcagaatggtagattctctaataggttacaccatacacttggaaaagctgcagggactcaatgccagccaatgaaagcagccgaaagaggggctgtatcctgcaaagccacaggggtggagctgcccaaggctatgtgagcccacctcttgcatcagcatgccctggatgttagacacagagtcaaaggagataattttggagctttaagatttaactgccccgctggattttggacttgcatgggacctgtagccccttcgttttggccagtttctcccatgtggaataggtgtattcacccaatgcctgtaaccccattgtatctaagaagtaactaacatgctttttattttacaggctcataggtggaagggatttgccttgtgtcagatgaaactttggacttcaaattttgagttaatgctggaatgagttaagactttggaggactgtgggaagggcatgactgttttttgaaatgtgaggattaagcataaaataatggcaaaccgcacaagaattattacaattcaaggtgagatttgggaggagccagggacagaatgatatggtttgcctctggggccccacccaaatctcaccttgaattataataattcccacatgtcaagggtgggaccaggtggagacaattgaatcatgagggtggtttctgccatgctgttttcatgatagtgagtgagttctcatgatatctgatggttttataaggggcttccctgtttgcttggcactcattctgtcccctgccgccctgtgaggaggtgacttttgccatgattgtaagtttcctgaggccttctcagccatgtggaactgtgagtcaattaaacctcttttctttgtacatttataaattacctagtctcaggtatttcctcatagtagcgcaagcacagactaatacaatggccaagaagtgatcataggatggtaatataataaacacatggaggggaaagtgagtgtagttgcaggttttcaggagaaaatctgaaaggggtgaccaaaaatgagtacctgaatgatgcagctttttgaaaaagtctatttgtaggtcattaacaaattgagattcaggaaatcattgtatggtttaaataggataaaatttttcactagaatgcttgatctctggggattcccagaagcccattcatgaaagtggttcattcatgcaacaaatattttaacaaatgccaagtatgttgtagaattattttaggtgctaggaaaacagcagtggataaaacaaaaattccttagagtttatattctaatggcgagtcataagtaatctacaaaataaataaatatacagtattctagatgatggtaagtgttttaaaggaaaaatgaaacaacaaatagtgatagtacaagcgggggtggtggtgataatttcaagtttaggtagggtaaagaagaagacatggatagacaggaagcccagatatagcatagtattccagggaccaaagcaagatgttcaggaaactagaggcctcaaattctcctactgcaatctgactttgtaccccaattaacagtgacagcatactgctttaaaataggaaataaagtggaaggaaagcaaatgcttgatagttgacctgacattcactgttgcaagattgggaacgtacaataaatgtcactgatggagaaatattcatgaagtaaaaatgtcagttttcaatttggcatgaggatggtttgacatgtattagtcatgcacagaatattatcataattaatgcattaataatacagctgtcctttttctcccaatcataagttaaaagggaggaaatagaggcaagtgaaagagcagctctcatcctgatcagaccttttctcttggcatttgtctcttcctctgcccagccatttctgtggcattggcttctgatcagtatcagtcttgatttatccatctcagttcttccttcacctttcatgaacaacaccagtggttttgtctgctgagggctttttccttaattttcagccatactttaaaaaatattttaaaagagagagatatatatagtaaaaatgagacataagcaaaatcaagaatataaaaatctcccataagctcactacccagagaaaactactattactattttggtgtttgtactgatctcggatagctggcgctgggatgactcaggggatttgattcttctccactgtttctcattctccagcaggctggccctagcctattctcatgtcattggcagaggcacgggcaagcttattctcacacctgctttttaagtctctatttgtgtcacattcactaacatcacaaagcaaatcatgtgattaagcccagtgtcaaggggcggaacattctgtcctacccatagttggaaggtactgcagggttatgtggcaaagggaagggtgaaaacttggggcaaaatttgcgacttcctatactgggtcaaaagacacccttgtttcaaggcttatgatagatgtttccaaattgctttctagaagggctgaaccaaccccactaatggtataagacttcctggctttccagttctctttagtcttgctgattctgggaatgatttatgaccttctgtctgggctgttttgatttgtatctccacctgtcttttaaggctgcacagtttttctttgtggtaattctttacttgcagaatacccccaaagctccctaagactctggtctacttaccttcttcatcctgatttcttctgcctgctttatctaacacttgtgctgaccaactcccagctatctgaatattcagtaatccatgtaggcctactccccaagtgttctaagttggtaggagttactacacatcttttaactttgctgcctacaccagcagtaatgtaattgttggtcctcattattcccagaatattggaatttttagggtcagaaaagagctcagaatccaatctcatttttatacaatattattccaaagatgtatgggtatttgtgtagatgaagataagggtatagatagaaatttgcatagaaaaaaggttgaaaggcattgccattgttaatatgctagtatacatctgtatatgggaattataggtgaattttttttttgcgatggagttttgctcttgttgcccaggttggagtgcaatggcacgatccctgctcactacaaccgccacctcccaggttcaagcgatcctcctgcctcagcctcccaaatagctgggattacaggcttgtagtaccacgcccagctaattttgtatttttagtagagatggggtttctccatgttggtcaggctggtctcgaactcctgacctcaggtgatccacccgcctcggcctcccataggtgaattttaaaaaatctttaatgttgcgtacagaaactgagggtcacagaagttaaataactcacctcatatcctaaagattaataatagtgaaactgactaatgcccagttctgctgattcctggtttaatgctctcttgagataataccacagtatgatctctgaggcctagctgtcttttgtttgattgtttgtatccaagctgtattggcagtttcttttggttttataagagtgctctgctgattgtgggttcacagggaaataaagaatgttttttaaatgattgagtcatctaagtcagctatgtaaatgtatatatatatatacacacatatatgtaatatctgtatgcataaattaccatgacttcaaaatttgacaaatggttcaggtaaatagtggattttatcttttaaatcacattaaggctcccaagtggatgcatcctgagttctggacacataatttatcataggcatcacatggattttatgtaattatattaattatttagtacatacaaaggtaagctctgcagaattagaatagaatcggataagtttttagggagatctaaattggtaagattgatcaaatttcttgctatgagtaattgaaggtgggtcactgtgatggagtgttcttcactggagctaagcttcactagagctattcggagtaattggggactggttaggagaccaatgcatcaacatctgtctataggaagtatggattcatctgctttgaaatgagtctttagtttgtttcctgcttgttctttatttctttttcacctgaatgctctttcaagaatattcaaaaacacaaaaacaaaaacttttcccctggagagtggggattagctcaagaatcaccatgatgatgagaagcagaaaacctggtttggagagtcctggacctggagaacaccaaaaagatgttagcatcttgagtatattgttctgatctaaagtcagatgttaaattttttactcacttagggctgtctgtgagactttgcggatcacagagagaatagacactgagaaatgaacgtgaactagtgggtacaaaggaaagggcacccgaggctgcttcatcaagctagaggagtgggaatctcagcccctgagaatgagcatctacaggctcttttttcctagtgcttctgtggtgtttgtttttcattgtgccacttggtttgcagaaaagaaaaaagaaaaaaaaaaaggctgccctggaagctgaggttttacaagtgctgagagaactgtcaacctattatagaattcagacagagactttcagctagagagggtttaggtattctgtgcctggctggactctagggactcacgcttgatcatactaggattcaagaacaacgcagttgtcactgttagcccatgatcccacacgtacccagacacattctctcacggcaagtacatctgcacctggatgccttctactagtatgacatacttaaaagtatcttggatatgccttaaagatcattgttggctgcttcttgatggcaaagtgctcagttagagccagtttaaacacatgtcaccagaactgaataaatagattttgataaaactgattcagtgaatatctcccttagggcgaagctcagccttctccacttcactggtgctatgaaaatcactagtcctcatttccaagctgtgtctgaattcagatttaactgctaaccattgtttaagaccgcagtgagatccacagggtagtctcaaggtgtgattaagacacttgggagtggtggtggttaaaaaaaaaaaaaaaatagagccaaagtgtaaggaggcaagctggaggcacgtggttatatgaggagaaaaattgcagtgaggccttctcatcaccctcttcagggtcaatgtgatggcttcgtagaatcaagtgcaagtctgtggctccattatctcaactggctagaagagagtgctactaaggcagaggtgggagcatgaaagttcacctaatagcttagttttgttaagtctcattgccacagtctgcaccttatcctgatgttctcactggaaaataactagcctagttcctgagaaggaattgtgaacagggcattgcctgtttgtcaaaaagttatttaaagtcactccagctcctcacttaacctctctatgcctgtttcctcttctcgaaaattacagtaataattattacagtaataatagaatagtacctatctcataggctttttgggaggattaaatgagttaataatctgaagatattgaaaaccacacctgtcatgtggtaagtggtcttcaaatgctaattgtttttatctttattaactgccatacccatgtttgattggcagctacatcttgtatgagtctttaatatttcatctgtaatttctgggttgctcctgccacagagaaggagcaagggagccattggtactactgatgaatattaggaggtggagacaccttgacaactgctgaaatgtactcatgcctgcctgcttgccctaactgcacttagtggcctggatttaggagctgccaatctcattacacaccagttttcatgactatcctcaacttactcctttcttaccactgctcagcacttatcctaagttgacaccaggctcattggtaatcatggactcacttctcccatctgaagtattcttgagttggctcccaagaagcattctctcttcatctccaactcaagggtgagctccttttcgtggaggaactaccctgtgtgtcctttccctccctctctccatcaccatcagcattcaattcagtattctgcacacacaggagtttagtctcaatttaaggtaggtcaggtttcattcacccttgagctccccttagcacccactacagactcattggagaggtgactattagaggtgcttgtggaaatgaatctcaaatagtgtccttctgcctgagtccttcattgaatccctcacttgtatacatgattcatactctggtagctttgatcattgtacaaaagaaaagtagtaactcttctttggggccaggccaggactgtggagcccaaagggcttttgtcatccctcctggaatggagttacctgatctggatattggaatgtttacatccttagtccttgaaaaggggaaaagttatgcttatcctcaattgtttaccatgacccttcctgtcacatcatactgttctacgaacacaagaatcatggctaacatttgtaaaccatctactatatgccaggtactctataatggaaggtattttacataaactttttatttaagtctgtgaattaggtataattcaatgcatttttaaagttaaagaaactgaggcttagagagctacttgaccaaaatcacaaggctactaattagtacaagccatttgatctaatactaacactaacttgttgtaactagcttgtcttgctcttaacttcttatctcagtccatttgtgctgctggaacaaaataccacagactgaataatttataaataatggaaacttatttctcacagtcctggagtctgggaagtccaagatccaggtgctggcacgtttcatgtctgctgagggctgctctctgcttccgggacgacagcttgttgctacttcctcctaaggggaggcatactgtgtcctcacatagctgaccttttatagaggttgctaatgccactcacgagggttctgccctcatggtttaactacttccccaaagccccacctcttaatacttatcacattggtgattaagtttcaacacatggattttaggcgacaatcagaccatagcatttcttctctacaggtttataaaaatacttttttgtcttgtatatattttcattatttttcctgcttgagtatacattttcatctctgaagacagggacacatttatggacattccttcctctgctctctaagactgcagtgattttatgtgcacatacatacattgaaaatgtatagttggctagatcctggaccccatataatagcttactggttactatacagcaggaggaactgaagagaaagaaagaatcaacagcaaaggtgcccatacctgttgcaatttgtattttgctcatgtcctagttcagcccatccaagggccaaccctgatagggcttaaatgttctcagcattagcttctcttcattaatatctgtttgtacctttctttgatgccgtatctatcctccataaggtacttattaattttcgcatcatcctgcttcatgttgttctgtccattatctgtaaggctcaaatatagaaagaaagtgcatccatatcagtgagagacagttcagagtgattgtgggtgagctcatggtttcctgcagctgcaggactagagagagctacttcatgatgttggagatctggagtttaggaagcctaggaggtattcaagcagcagtcagtcagcttgccttgcatttttaaaagcatgtctgcaattttatggtgtgttctcctctcccaccactgctgttttcctccattactgcttaggttgctaccctgagagagaagcagccatgctgattctttatcttttaccaaaagggcagcagcagcatctctttctaaattgttattatgaagagaatagctactgtggtttgaatatccccttcaaaactcatgtaaaatgtaattgccattgtgatggtattaagagatgggacccttaagaggtgattaggccacaagagctccattttcataaataaattaatatcattatttcaagagtgggttgttataaaaacaaacttgcccccgtctgtgtttcagtctcaccctcacttgcccttctgcctctgtcatgagatgacatagcatgaaggcccttgtaaaatgtcagcaccttgatattgaacttcccagcatctggaactatgagaaatcaatttgttttcgttgtaaattatccagcctatggtattccactatacaataacaaaatggactaagacaataacccatccacacgatacaatgcatgatgtagaaagtaaatacattgaaataaatacaatgcaaagaaggtctttgttatccaagacgctctgtcctgttctgcagagttaacaaccatcatatctctcatatgatacttcttactagaaaattcccaggcgtacacaggtgtgtgtgtttcacccctttttgcctttataaatggaattggctggaatgctgctgagatcccagctgctgaccctcctgtcaggtgccctgtggttctcattagggcctctgggatactaacattcacacaggcaatgtactttcccttcctgacgcctctggggcccacccgggaccgtcaaacagaccctgcaaagcttaggagatcaattccaacagaagtccagagccatggtgctcttggaaaaatcacaaaccaaaatatagaagtaagactttttcttcctaaattttaggaagaataagaaaatttagtggacttatttgtccactaaaatattaaatgtgaggagaggggaaggcaaaactatggatgattattttcttttttttatatttctgtaactttaaataaggatctatatttataatgaaaacatttatttataatgaaaaaaacctcaatctatcaaaaaaaaaacaaaccccaaaaagtattgccagttcccattgaagtggaatcttaggctctcaacttattaaatgtactaataaagtttttattggtaagcagatacaaaatcgctttataagaatccccagggaattactaagcattgttttgtaatagtaaaattggatcctaatgagcatagtggtagaagtcactgtctgcagaaattagaaatgaaatagagttgattctgggtatgtctgcattgaattagtagagtgtcttggaaagcttgctggactatgatgtgcacggtgggtaacaggatctcccagggtgttcaaagcagcatgattccatccccagcttgccctgcttgttgaaaatcactctctaggacagtattttctgtgctgtgggttttagcctctgtgggcctggaatattactgctggtgactgtggacccttccaaacataacatactgtctgccacaaataacacagttactatttattgagtgtttcttatgtgccagccaccgttctaagaactttcatgcatttacttatccagttcagtaatccggtaaagctaatagcatgttgattaccttatgattgaggaaactgaaacacaaagggctgaagaagattgtctagagtctctcttctattaggaggtggggtcatggttaaaaagagccacctcctaatcactaaaccatgtcacctctcagattagtggatgacatctcctgtatgtggaccatctgtctgtatgtgtgcctgcgattgttttccagatatttgtagagattgttgagattgaacaagcagaaattcatataagagccatactgagtttacatcagcttttggtcatcagtattttctgtcagtggatctaaaatgcgactcttttcttgtgatgatcctccaagtatttggctgttctaaaaaggctatggtcccaaaggctgaacgtcattgttctagaggaaggattttcctgtgatgatcctccaagtatttggctgttctaaaaaggctatggtcccaaaggctgaacatcattgtcctacaggaaggatttggtcatcaaacacacaccatccctagttctttcccaaacagctctcctccagctctgtcatgtctccaccaggatcaaatggcatggtctctcattctttgtgatgtagacagacactggtgagataaattgataagcactgctttgggagtcatctgttgaaatacaaaaataactttgtaacataacctccttctccttagaaacaattattggaggaatttatgaattttacatcttgtgtgagaggctgacagaacctccaatcagaaaggccgtgttctagcgtcaaatcatccatcatttgtgtaactttcagcaagtcactctacctctgtacctctgcattttcaatttgcaagagtggttgcagagttaaactagatgatggtattatatacttgtttttggtttgtctatttctttattttaaagaatgttcaatatctactccataacaggcatagcattagcttcaggatttccagcagtgagccaaacatacagagccctagttctcatggggttgatttcctatttgaggaaaagagacaaaaaggaaatatacaaatacatacattattaggtggtgataaatgctatggagaaaaataagaagaaataggggagataaggggggggggtgattaatttatgtagacattcaggaaaggcctcaatgttgaagtagtattcaagctcatacctgagaaaattagagcctgagccaaaaggctatcagggcagatggtcacaggcagccagtgcaaaggacctgaggtgggaatgtgcttggtgagttggaggcacaggaaggggcctgtgtggctagtacagagggaggaaggctgagagtagagatgatatctgagcttccaaggggccagagaatggaaggtttgggagtgagacggagccatggacaaattgaagcagagtgaatatgctctgatttatactgttaaaagttgatcactcctgcggagtgtggatagaaatttagggacaagggagggtggagggagactagttaggagactattgtcataatccaggtggcttggccatgaagttagtggcggaagaggtctcattctgggcatatcttgaagctatgcttgatggggttgttggtaattgggtctggggtatgagaggaagggaggggccagggtgacaccaagcatgtgattaaggcctgagcacctggactgatgagctgttgtttgctaagatgggtaaggctgagagagatgcagttttaggggaagggttggatattaggggttcagctttggacttgcatttccgtgtctaggagacactctagtagagatatgaaattggtgatggtatgagtaaggttggagtttagacaaaaatctaggctagaattatggatttgagaatcattagcatacacatgctatttagaggcttgagactggatggaagcgtagataaattgagtgtagctagtgggggccaaagcattgattctcttcccaaatgctagggagccctattacttggagcaggaattgtcagacagtgaccagattttcatgtctttttgtaaataaagtttaattggaaccattcatctgcatttctttatctattgtctgtggctgttgttgagctacaacaggagagctgagtagttgtgacaaagactcatggcctgccaaaggccaacaaaatctaccatctggctgtttagagacagggtttttgtttttgtttttgttttttttgacccttgatttagagatcaaggagataagaggcatccagcaaaggaagctgagaaggaatagccagagaggaaagaagagtgccaagagttctgcattgaaggaaagatggtgccagggtttgaacacacagcattagaatacgtgaggctgggcaagttacttccccataaggacggtagtagcacaggattggcataaaaattaaagtagatgatgcatgcaaaacacttacagctgtgcctggtatccagtaagtattcagtaaatgctcttacagcatctacttctatttgcttagtctgtagtcctcagccaaggctctgtactggagacaaatcaggatgtttgaggattagccccaccgcctgatcaggtaagcctatgatctatgctcagggacctgaggaagaaggaggaaggtgagccatgtcccccgaccctgaccgtgtacaccctgtcccccaagaggaccttgaagaagagcccttcagcatctgctttttacttcctatctttgacaaacagtctttatggaaagcttttgagcaaacggcaaatccatctttatgagattactaatgtcaacacattttgtgtatcaggattttataggctcctgcgggcctgtgcctgtgacaacattggctggcagtgctcgcctgaggaattatgcaacatgcccctgatgctggagaaggatcttgatatcccactgaggcccgggacattttctcccagaaacagtcttgaatgagaagcttgaagaggggagttagatttactggggcttctctaaagattctgtgtccaaagcttgaatagggaaagaaatactttgcatccatgtagcaggttctgcattcagcataccaggtttgctcctagttaaagagtcatggagcccatgggagtgtttgttctttgggaatgtcataaaagagaatttggcctctcccacttacatgttcttgcatttcttattggtccttctcttgcaattattgctactttccctggtcaacctctagagcagtggctttccaagtgccttctgtggacaggtagtatcagcatcatctagaaacttagagacgcaaatcctcggtgcacccccaacccatggaatcaaccgtttttaatgtgtgacctttggcagattagttacccctctgaaatctagtcttaccctatgaaatatgggaacgttaatagcacaggattattgtaaatattaaatgagatgattttaatgagtcttccaggcgattctgattatgctacagttccactcctaaagattcttctaaaagattcccatttttggacaattagaagttcctgctaagagaaattttcagattttatccctctacacattcgcaactatttttaatctgagctaatctgccaatcatctttccaaaatgaattaatactctcccattttcttaaaaattttgtaggatatcaaccattttaaactttttcttaaagactcagggcatcatcatgaatataattattgttatattagatgttgggcctttgtcatatttctatattttgtgttgtttaccagtttttttcagcttctttaaaaatagaatctttagtttgctaccttcttcttcattgtctggatatcagctatttttttaatagctatatccagtattatccccatcactttctaattttttacttttaacttgattttgcacaaggactgaaataaccaagatgattaataatgtactcaaagcaagaataaatcattaaacataatagtaaataaatgagaagaatttattgagaggaaataaatgagagggattttttttgaaagtataagcttctgtacctgagttttgcatcataaagtctggattcttgggtaccttactatttacttctgatcatgtcatagttgtcttgaataactgaatagctgatgttttgaataaatgaaaagtttttgtagcatactcaccactcaatcattctcctgaatgttccaccctcatcatgttatacctttctatcctttgcatatattgttgacatatacattttcctaggtgatacagtttgtaactgatatcatccaatcacaagtaaattactgctctgtggaataaaaggtaataactaaatgggacatgtctcctctttcactccctttttgctgttgttccacttctcctgggctcctgatgaagtctaggggagagtatacagggctgagatgtgaacaaccctaggatctaggcttggctctgccactaagtgactatgtagaactaggcaaatctcttggcctctctgggccatgagatgcaacactataaatcagtacgataatactcgcttctccttccttatagcagtagagcaagaatccaaataaatagtacaagtgagaactcaacacaatctacatctgtgaagcatcattcttaaggtatatccagggcatttggctccacgtagacctagaggttgctttctcagtcccttgtccgccccatatccagctgccttggctcacagagtttgagactgtgctgtattttctgtcatgcttcagagtgtatcaaatcaacacaaatataaaataaagccataaagagaaggctgatattcaccatagaaaatgttggagggaaagacaaaaacactcaacgacaacttcacaaacaacccttattatggctgtggaagacacaatagtatgtgtaatgtggtgtttgggctgtatttgctgcttgggaatctggtgcattctgagatggagggaatgccaagtgtttagacaacatgctgcttggcgcctgcaggttcctggaaaggactggggtctccagatctaggctgccagccaggagtctcaggcagagacatgcattctaccgtttaaggcctttctagacttcagcagtgagcagatacaggagccctcaagaagctctgcaaaagcctaccaccactgagatccaggacataatatgcattcctaagcaggctgctgcctttggctgagtctatctgggggccttctctctgcaggagaggatgctaacagctactgttcctgaaggactcataagaagacttctgtgcacttccagcctcccacatgaagcttctggaagggctaacccggttcatttcatctacttgctgcctatgccaatcctatcccctcttcaaagcccagtttaagtctgaccttccccatgaaatcaccaaagcctttagtcttcatgacccctcctgcctctggcggtctcttgcacttgttgcctgagattctcttaagctcttttcatctgctgccttgttagttaaatttactctgagtgtgttttatcttgtttcctcagctggattgtctgcatcttgggggaagggaaagttcttataaatcctggttctgctcttgggccaggacatgcctggggcagcaggtgtgtcttccccacctagactgaggaattgtgtctcaggggctgggctggattccgcaggagggaggccagggctgccaagagcaggagagccagagaaaagaatcaaatggccttaaatttgatttaagtttcaaattgcttgaacccaggaggcggaggttgtagtgagccaaatcgcaccattgcactccagcctgggcgacaagagtgaaactccgtttgaaacaaacaaacaaaaaaacaaacaaacaaacaaacaaaaacaagcctggcaactgctgccaagtgtctcatccaaagaaggaagggggatcgaaaccaaagaattgtgaagtcacaggatcaacagtcaggcaagtggctaaggactcaggctatgaagggtcctctgccacggttaggaggtttctttgttgttttgtggtgctctttgtggtgtagaaacaggtcatttctctacaaggattcatgcaggttggacagttccatcatggtctgctcccaagcatggggcctgtagaagtaatgacttttcttctggtcccagtccacaaagagatcgtgatcccattccccttacctgtacaatgcaggggtgagactcaatcctttcttgagtcccagtaaatgacttgagagattgtgagcagaccaatatcttctgtaaatgactggatattccagggaatactttcaaaaagcatcttggacataaaaacttttttttttcataagcagtggaggcttggggtcaaaagctagaccattcctaaaggaaagtttgatagtttcttctttgggagtgaaaaccctatgcatttaagaacagaaaggaaagcttgcataggtctgaaaatggaaaataggcctatttcctttaagaatagtaaatttcaggccagatgcactggctcatgcctgtaatcccaggactttcggaggctgaggtgggcagatcacttgagatcaggagttcaagaccatcctggccaacatggcaaaaccttctctctactaaaaaatacaaaaattagctgggtgtggtggcacgtggctgtaattccagctactcgggaagctgaggcacaagaagcagaggttgcagtaagccaagagcaggccactgcactccagccagggagacagaaggagactctgtctcaaaacaaacaaacaaacaaacaaaaaaccaaaaaagaatggtaaattccaattaacaacaggagatggaacaaatggtggacagtgactgtcatcagagaagtaaatgctatgtctgcaaaaaagaggtgagggcacagtgatgcgtagagacccctggctttaattatcccatgccttggtgttactggtcctctggagatctacttaacaggaagtagtgagctatgtccccacaaaagcatcccagaggccatttctgagcaggatggcctgtgggagtcgagtggtcagttgccatggttagcagagatttcctgctgagaagtcgcccctatgtgtgcacatggacagtgttgggtagagcaatgctccttcaactttagtgtgtttaccatcacctggggatcttgttgagctacacgttctgatttcataggcctggagtggaacccaagactgtgtttctaactagcttccaggtgctgtccatattgcggggctgtggaccacattttgagtagcgtggtgtagtggacactggaggaagaagtgtagacctgagctctagccccagctcagccctgtgtgtggccctgggcaagtcactgacactctaagactcacaattatgtcaatcatagtgataaagggaaatgaactagaaagactctccctggttctatgatgcgatgtttctgttacagtcccacagagaatttagacctctaccttgttcttccttagagtagactgttggccctagagatgtgcccagtggtcatgtaacatggagatatgcttgattaattcactgtacatgggttgtttgaccagcttctacccagtgcctataagagtagataccagactctatttttatgtcatttgaaagacaagggtagaagagacagcagttcagtgacagttgcgccatcgccattactctaatggttcagaaatagcttcccctcttcccctgtggaatgtttagattcatacttttaacctgtagcattttcctacccttcctgtgtaggaagcaggtgcattggaccaccctaaaacaatgcgtaggcctcagacttctgaactcatttctctgagatgagatgtccagtttgttcactacaacaatagttgccagacctattacggttatgtaataggtttctttttttaaacaggtcttgaaaatgtatgcattattctttaggtaataaatgaaatttaaaagactgaaaataaatcagctttgcaaagtgggggctgaagcttttctactaactgaaccatcttttcttttttattcttgttactttttaaggagatgatggcaagtgatttctttttaacccattttaagggcccagttcatcttgtacaattcttgtgcaaagtctctactgagactttggcctgatgcaaaagaagaggcccttagagaataatgctgggcatggagtgtgattcaagaagttattatcgtgtgttctctgacacagggtggctcttgctccccaagggtccaacagagaggggcccaggcatgcagaatattacatgcctgccctgtttccccatcagagaaatgttttccaacagccattgtggttgtagtaaggaaaaacatgtctttctgcctggatatatcaactgagggatgaacggtgagagaatataattgtctaaggatgacaacaggatcaatttccctttgacactgtaggccaccacctctttgtctccataaaatttcattagcacttgaatttatcagattggcttagctgttgtgcattctgctctgtgtgcaacgggcccattgttctactctactttaactggttttctgatggatgtgtttatgatacctcctgctgggtattgtgcgtgacaactggggactcgataactaaacaatatctgaacgcagaatccctctgtccagggaggggctgaggaagtcacaacagttaatctgtagtaggacccatgtcctcccatctgcaggggatgctctgttggcttgcaaagtggaaagatctgggaggctgaggtctgatgtcgtcgtcatcggcagagcgaccttgctcctcatttgtgcgcacaggcactgaatggagggagccttgaatcatctgattttgctcctcattagtatttctccactgtgttctctgaccacactttcctcctcggtgcatgcaaagctattagcaatgcacacacgcggcacatctgtggagccattattgctgctggatagctgtgtttgtgtaaaatattgaacaccctgtgaagatttataatggtttcccgccctgtcctctatccaccccctcttctctatttaaagacatattaacatctctagctctacctggaggaaaaactctttgaagtgagactgcacgaagataaaatgccttctctgaaagcgtccctctagaatgagcatggaggccttctgagaggccagggaaccacctgaggcacaggggcaggatgtctctgctggaaggcctcaggcccctctctccctgctttctgtccctactgggagtcagctctcccaagcacaggctaagcacccttgtgaccacagttatctggcccttgtgagagcttgctggtgactttcctgagactggagtcccgaggcttttaacaatgtggatgtgccttggccaaaagacatcctctgggttccttaatacttgtcttcactcttctgttttgtcagtggagatgccagtagctgtaatttagtcttgggtgggagagagccagaggtcgaggagggggtggggaaattgtcatcctaacccagcatagaggacctggtttaaagaggcttaacagaccactggtcttaccagcagatgcacctggggcttcgagagtgacttgggcttagcttcttcaaagggtgctgaaatctctcaccacccctgctcaaccctcttgctgcccccaccccaatggagaggggcccaggcatgcagaatattgtattccaacgatgctagattcatgtgcatgatatggaagggtctggagggaagaggctgctggtgcctatggccctgaggaccagctttctccttcccccatgtccccaggccaccccacccagagcatgccctcggcacgcaacaagcggcatgttccaggttgttccagggccagagagagtgacatgaggcaatgtctgtggcaagcgaaaaatgtgtgctgagccttgggaggcgccgattggctggcagtgaggtaatgcaatgcagtccaaatgtggaagcagcagtaccagcatcgagggcgtgcctcctcggcaagcctgagtctcctgccagccatctgaaggacaaggcgccgaggggtgctgcagacctcatgcaggtggctggctcacatggcagggtctgggtggtagagatcagatggcaggatctgagttgtcatgtctgttctctgtccctgaacacaccaaatgccactacaattctgatctctgttcttcaatggggatctcttagtggggagggcaaagaagcttgaaaatgagggtctggacctcagaaccacttacccaggtcatggtgagtgatggtcaatacaactactcttgaggattaggatggttttctcagtaaccgatggcttccctttaatgatataaaccttctcagggtctttcctaagcacagttctagattcatatttgggccagaagtccacactcaatctccccattccagtccatttcctatgactttgtgtcattggcaatgtccgctacgaaggatggaggaattcaagaggccactgtgggctatgctttcttctctttaataagactcctgttccaggagaaaactggcctctcaaaaaaagtcttctgaggaatagcagctaccaggaatcacagttggttccccatgaacatttcagatcaattacataaataataactacctattgtcttctagtgtcagtaccacaggagtaactccacatctttgagttaataaataaatttacttacttattcaataaatattctggactctttacggcagttctgacaatgttctaaatgtataggctatggtggtgagcagaacaaagtccttggtctcatgaagctaacattgtaaagggagatacagacaaaaagcaagagagctaagaagaaaatgaaagaggataatgaaatacagggtggctagtgattgaggcaactgtagttgggtggtcagggatgacctctgtaaagaggtaacattttagctgagacatcagtgaagccaatatggccatgagaagttctaggagaaaactccctgctggccccagaaattaattacaatatgaagctttagggaaggccacagggttgaatacctaagaagaaatatcccagtggttaaggacaacttctgctttgccactcagagagaagcagagcttgtcattgagctagtacagtcctgtgcactcgtgggagtaaggtcgcctcctttccccaggcacacagtaactctgctggattgctgactcctggcagtgtcttgtagcaaggtagactggggggtggcagatgcaaactctccctaaagaggtatcatcctcagttatttccattcacccaaaccctttctttcctccaaatcacactggctatatatctgaatgttttctttgacccagatcctattcttggcttctgtagacattgtcttgtttgatccctataaaaatctgcaagatggatgctataatttgcatttgactaaggaggaaactgaggctgtaagagataaggcaactctcccaagatggctcttttggggagacgtagaattgaggtccaaactcctaagaaagatggaactttggccatctccattgaggatgaataactcatcaaactattcctgggaaagggggtggcagaggagagagagatattgagacaggctacatatcataatatcatgggttaaaccaacagcaattttagaccccaaggggacaattcgcatagctgcagacgtttttccttgtcacactggggatgggtggggagcgctactgacatctagtgggtagagacctgggatgaggttctaaatgttctacgacgcacatgacagtgccacagcaaagaattatttggccccagatgtcaatagtgctgaggttgagaaaccttcgattaaagtcttacagtgctcactgctctctgcttcctctgtcttccttctatggctgccctcggggttacttacacactggatctctagatacaggactaaagtcataatggaaatttaagattccatttggatgctgatttttttcccaagctctcttcactatttattaaatggttagtgaagggaggtggaaagcttgatctccaggcaagtgagtcccttggacgtggggtggggagggtgaagctctggtgtggtactgcatcagcctagtgggaggtgcttgttaaccctctgtgctgtggcttccccatctgtaaaatggaggtgaaaatacctcctcctgccacctctcaggtttgctgtgagaagtcagtgatgtgtaagtgctttcataaaagtactatatacgtgtgttattactaattcttatatcatgaataaaatgaaatcatcattctgcccctgacaacaccaatttgctgaaccattagaattctgtacattacagtcttaaagagccatagagagaactgtaagggacctcaagaggtcatgcggtagaaaatggccagtgagacacttgggaatgattaaagtgaggtgggaagacacatggcatcttattcagttactcaactctcctttgttcacttccttgcatcatcattgcctttaggagtaatataataactgcattaataaagttgttatcctcctcccacccctgccagagctctgagggcacagtctaaacagaataattaattaatgaaaatgaagagaaaatagctcaagtgatggctataggagatcaaatagcaaagagaaagctgcaaaaacgttcgttgttatttgacactgagtagtgcaaagagggctgggagagtcccaggatccctgatcaacagagagagagtatcctgggggtttcctctttactttttctttttctgctctgaaaggttaggaaagatcctgagggcataatctgaccatctgatccaggccagcatactgctggagaagactgtgtcggggatgaggtggtctgagaagctggaataaatgcaggatcagctgataaggagggtgaggaaaaggtgagcttagtgtctgactttaaaaatatgtagatgagctccctaaataaaatacccctccacactgtactgatgactgaaattcctttaagagaaaatattttcgttctacaattaaagatagaatcctattttttccagggagaagtaatattgtcttaaatttatcctacattactacatgttgattacaaaaactgaagaatctattttctttgttttttttccagtttttatctccatccccatcttgcatcttacaaaggacccaatagaagcttcatggggtacaggaaagaatatagcaaggaccttggaggcctcaggcctcaatctggctctgccattcaatagtttgaccttggagagcaatcagaattctcagggccttagatcctctgcccgtgaagctgaggtattggactggatatctccaagggccctactaacaataagattatggactggggatggcttttcttctttccattttgttcaaggaagcctcctcttcgtcatttctcacctaccacccagctctgtattttcccatatttcaatgtcctttcatgaagacatataaacagtggccatgagtcaaggggatgcaagggtatctgtggttcaagaagatgcacgtgatgaccacggctagttgatccctcttggcatattgttgccatctcagaaagacaggaagggtgggttacagctgccagcaccatcaggattaaaagcaggaggactttaagactcaccctcgatgatgcagaactcaaaaggtctctgcttcacagctctgggccaccttgaagggcaagttgacaaaataaagcaaagcccagacagccttacagagtagtagattctgcattcctcattttcatggataattactgtagccttcaatttgaggaacatggcagtgatttgtgtgcagtttactcttctttcaggtgatggaaccagagccagaggcgtggatgtgactctgttgccctctagtggctagaatgcagtagcatacccagcaccccctcagacttggcttggtggtgccgctgacacgtgagcaagggttcctgggacactgactgccaagggggctcgggattctttcagcacaactcctgacctgagattctgcagagagagagagagagggagggagggaaagagcatcatccttcctatttctggaagtcagatctgtaacacagagggcctgtttcgtctagagtaaccctgtaccagctgcagcgctgggacgctcctgcctcttctgcggtcgcatgtccatgttttggggcagctaaggcacctggggtctgctctcgcagtcacacatttgctgtgtcacttctgcctcagttagatgttttctctagcaaacagatatcattatgtggttttccaattatcacttcccaaagggagctggttaatatggatgaggctttttaacatttggctttgaagacagggttatatgtagttgtagcagagggagccaatatctcggtaattggctaaggtttgcagaggagcaaggcagtctggggtatgtgccatctctgggacgcggggtctttgcagaatgtgttattgtggtgtagtctttaagtgagttctcagataaactggaaggtgggtctaggtggagattatttcaagaaggttagaactctggtctctggttacaataaaaaagctggattgctgaagatcatatgggcattgttgatgttgggctcaggcagagagttcttagtagggtcttcttaccctgacggttgccctttgtaacaggcaataatacaagaggattaatttatggagaggctgaagaggttagtggaatgagaagagatgcagcatgcagggacaaaactcagtttactatatcagcttcttttaccctttgggacaagaatccccaatttactgggcaaaacttccctccttctacttcctcttccaagagtttaactcatggaaaggaaatgaggggaaatagcacatttcatggcatcgaagagggcatctttgaaacctagcggctttccacctacagacatttagaatgcaacttatgctggcaaagctattgagggtttaaatgatatgctttatagcgtgttgcatttcttcctttgaaaatgaggagcttgaattacctttcttgcttcataatagaaatttagtcttatttctcagtctatagttaacacatagcaatctggtgccttcgagtgacaatttacctaaaagtcagcgttacatagatagttctacaaaatccaaacttacatgctttgtctgtacacttcttggtcttccaaccttcaggatcaccattgattccttttcctgtacccctccaacccctgacactgttaaactccatttcagtagtcattcacccagtcctgcagattttttgtccctacagcctaacattagttttcaaccagatcactctttttttacactattcaaaaatttctttagctttaaaagccctcatgagccaaagtgccagagatacttgtggtgttctaaagtatttgctgggacagggttaaatggatagggaaaaaaagaaataataggagggaaaagggtcccatgaaaagcttgctgcctggtggtggggaagatggagtaccaccagctatcattataggctgggccaggtgataggcagaataaagtgacttaagaaatttctggaagcacttcactgcactgcaagtcatgccactcttcctcagctcacagttggcagaagcaccactataaactgggttcagccacgtgtcccttagacacataagagagggagtgccaattgggaggacaggtgaccgaggggggcagagggacacattcatttattacccagttttgtcctggattgatgctggtcttgggtatccgacagtggaaccactctagtacctgacacacctactcttgacccagctttttcactcccaatttggttgttatacagcaccacaaatagggaaagatggctgggactttgaagagaacaggtggctcctatcagctggtgctaaaagagccccaccttatagatatgtatcttacactcatatgaccttccctactacaatactgtcataaagtcaaaaatgtgtgtctcttgtccctttgggctcccccagctccatttaataccgttcccaatgtttgtacctaattacagatttgaggagtcataaaaccacatctcccaagaggtagatctgctttattttggcttctgtgacacctgattgtcctctttcttcattcacctttaatgatttgcttccttttgttgcttatcaaggacttgtgctcctgaaggttctgtccttgactcccttgtcttcccccaacattatctttctggacaatctctaccaccttaatgttaatgagcctcaactccaaattggcagcccagatcaccctccagggctctggacatgtgtccccagctttctattagacatctctacctacttgtcccacaagaacctcaaacaacaaacatctaaacctgaatttatcctctgctccacaaaagtcacttctctatttctcattagaagtatagaaatggaagaatgaaaaacttccatccattctatcacttggtattaacctagaccttttccccttgctcaaccccatctctccttttgccttttaccacgaatctgtcaccagatcttacaattctacttctcaaatatctttccagacagactcttcctctccatgtctactttactgccctagttcagggtttcatcaccttgatctggcctttgatatctgcctccatgtgtccaggacctgcatgctaatccctgaaagaaaacctggatacagttttgcagctgaattttattttaatgaaatctgcattcttgtggataaccttccaacacactacttcagtaatatcactgactgtagcaataataataatatcagtgactataacaaaaacttttggcttaaaaaaaaatccatttgcaatgacttcactttccgaagttctcaactgatacccagagccattctttttggtcatatgccaattttgtgagtaaaatatagggtttctttatgaccatacatttcctatgatggcgagcttatgagggtggtccttcatgcaagtttctcatctttctatagcctgaaaagtactgattctttttttttttttgagatggaatctcactgtgttgcccaggctggagtgcagtggcatgatctcggctcactgcaagctccgtctcctgggttcacgccattctcctgcctcagcctcccaagtagctgggactacaggtacccgccaccacgcccggctaattttttgtatatttttagtagacacagggtttcaccatgttagccaggatggtctctatctcctgacctcgtgatccacccacctcggcctcccaaagtgctgggattacaggtgtgagccactgtgcctggccttgattctttgaaaatgaactctttttggcaccctcatcttctgccatcttggtccattttgcttatcagagtaaatacaactggtaaaaaggtttatgctatttattctccctccagtcttggttcataacatgctcagttaaatttctccctcattgagtgtctcctcaaagataaatattttaccttggaaagtctggtcatttctaaggttaggaaaatgctatcagtcactttggagttgattgcctatgtcaggttggcattcttggatgaactacaggtttaagatttgctgttctgcatgcatcactgtgaagtcatctgagatgggcgctgacctgtagctcacaaggagtttcaaggtcttctatcatcctcctttcaaacactcacagtgattaattctccagaaatcactactggtgctatcaccttcagaaaacaattttctttctgaatacatgtagggtatataggcttctctggtttggtttgcatttcacattagcctttttttttttttttttttttaaattccaaggaactctaccttcaaaagcaagcaaagcattctcctcccaggtggcccatgtactggattttggagtctgaattgttatttcctcactcctgccttcctctcttcttggctttctttctagggcacctgacgtccttccttattactgatggcagcagagactgaacccctgggagaggaaagtgaactgagtaattgttttgccttttcatgtctgatgtatcactctgggtcagtgtagctttagttgaaagagtaatgttgttacccaggagcagctgtagtgtctccagacaactccaagacctctccagtcccgcagaggtcagtttctggtctgggcataatggtcttttttccaggggttgaagcccagctagaagcaaattcctactctgatttctcaagactctgaacacccacaccggcccatgagggcagagagtggtggctggctttctaaaccagccttgtgtcttcagagtccttgatcagagataacttggggaaagctgtgtctcataaatccactttgctactgggtcagagagatgccttgagaatgaccttagctagggaagggatggaatattggtttccctttgtcccctgcccttcagttcatggcatagggttaagagagtgtcaggagcctgcaggcctgttctgtgcttagcgtggggagacatggcagcaagttggcaagctggggtcttcttattccaaattcaaccatttcttggcactttttttgtttctttttctgagaggtagtagacagtggagctaaataaaattttctcccaagaaaaaatggttagaagcagcgtgtcccctgcccaggcctgaaatctcttcattccctttccctttccccagggttcccaaaggtcttctgcattgcccacctgctgctctctttcctgccctgtttgttttgatggcattaaaaggcctgcctgcctactttacaaggaccctcatttctttacccatcatgttttgatatattttttcttgctttttcttgaggtttgcaatcaagagccctttaactgaaatcctgggctgcctgcagcagctgtggggttcccagccaactgccttgtcctctgagggataaattccctttgaccgtgccacttgtgaaaacacagagcaagtgtagagtattttacatataatttagaaagagagaggacttatcggtgggtggtaggaaaggacagaagatggattaatattttttctttatcacttggcatgttaaacttaattatatttcttgaaagacctctaaacagttataattagaaattatgataatagctgcggttgccttacacatgttcattttactgcttgcttctttgtgaatgtgggctgtgattaataaataaccaccaacatcattaggacaagacctctccttgcctgctgggacccctttgactttggatggacagtgtcaaggatcaggagcacctagactagccccatgagccatggccttcataggctagatggtcattggaaatgaagttgttggcaccgacagtcacagttatgaaaataagaatttggatctcagatttttctgctccctcttctcctgtgtattagtccgttcttatgctgctaataaagacatacccgagactgagtaatttataaaggaaagaggtttaatggactcacagttccacttggctagggaggcctcacaatcacgacggaagatgaaggaagagcaaagggatgtcttacacggaggcaggctagagagaattagagccaagtgaaagaggaaacccattataaaatcatcagatcttgtgagacttattcactaccacaagaacagtatgagggaaactgcctccataattcaattatctcctaccgggtttctctcacaacacttgggaattatgggagctacaattcaagatgagatttgggtggggacacagccaaaccatgtcatcctctcttggtcatttgttttttttttttttgatttacaagtatcgtttattcactcacttatttttgtgcagggatgacaagagagtcacaggaatatccctaaatacttacggtatcattgtaaagagaaataacccaagaagagagtgaaaaaagaacctcctaaccaagggctgcagttgagtactaactactctgtggtgagaaataggaaatttagtattaagttaaagcaaaatcctttttaacatttctgaggtctattctcatgttgattataaatgggaaaagtgagaattagcttacttctaacctagctgcctgtttggccctgcaaaggattttagagatccccttcattctgtttattttatggaagaggaatttgagtctggaggagttaagacattgactgggcaaagaggcccaaccactcatgttcagacctccctgtgagatgccatataagaatatcaagagaaaaccttttaccctctaggctgttcaaccttagaaattcataagagcccccttagtagtcaattatgaatgataacaataaagatccatgttcaaagtattgaaagcactgtttcaataactttcttacagcatgggtgtatgacagaccagagactaaatacggagtcctaattctcaagacagtctcaaaggatattcaagatcaaatttagaaaatatattgtcagaagcctgttccccagagtcacattcaaagatttttctcagagaaattttcctaaaggcatgattctaaagagatctagtacaaggcaaaggatttcgattttttttcccctactacttcctcatctccaccccacaagttgacctggagtcatctttggtccttttgagttttaagtcatcatcttccctcaggctcaagaggaagcctgctgtattttgatgagacaactcacctttgatgtcacagttttcactcttcaagaacaaggagtcattagtatcttgacatctaactgtataagttaaagcacttcctggaagctcaaagggaaacactgaactcttaacacacagattctgctggaagtaaatgactctgccctataaaaggaggagaaagaaattctatttgagtaatgccgttgaaatattaaaagaaattcagagggaaaaatatccaagtgaataatatatattggatctctggcctctaatttgacattcaggtcagatcaaaactaaccctgtgagattctggaatttaatgtcatataaaaatgctactgggcaaggaactttattacacatgatcataaaaatatatgggaggcgccatctctgggtatttttctatcaaatctttactcattttacagtctttacaaacagaagccagaagtgctatatttgaacatctacatttgttgggatttctttaaaaaaaataaaacaaaaagaagaatcacattttatacgtgttaaatggtgtagtagtaaaccatgtttaaaaaagcttcagttttcattggtgtacaaagctgctacatgtaaatattggaaccactttttaaaagaggattgctgcagtcagattttttaaaataataaaataatcacaaagttcaacatatggtgtcttcatgtgattataagtgtgcgagtgtgtatacatgtttttaattccttaggattagcagaatgacaaaatgtgtgaagaaggatagatgatggttatttcaagcagcacaagaatttgaggaggaggtggagactaagaagagagaggaaaaaaagatcaagcaggacaagggacatgggtacaagactagaagaaaagctggatttctttaaactagaaaaatcaaagacatctgttccccttatggcaataaccacatttttctagaaatttacacattaacatctaaaaatggatttgtgctaaaaatacaagctatgctcaatgcatgactcttgaatgactttcccctatgattcctctgtagtcatatggcaaggccatgccctcatctgacattttttttagtcaggaaataccaacttcagttttctttgatcatgtgatttccttggcctggaaactcttctctgtctttccccctaaccaactcttactcattcttctagactaactcagctctttaatcactgagaaaaccttccctgcctatctttgtcccttccttagttttactgaatttgcctgccctgtactctgatagcacattgtatttaaataaacacttacggtctctcccgctaggctgtgaacttcttaagtgaaaagccatgttttattgaaatctatatttctggaacctaacacagtgtcctagatgctcgataaatatgttttggactaaaatatgctgctagtttaatgctccagttcctgatgaagccagggctttctttcccaggagacagtcaactcagggggcatgtttggtttagtacctgccagcgtgttgttgacaaacaccatatactctctgttgcaaagccaaaacatgaccttttccacaaatggagtaagcgtttattggggaataaaaaagtatgatgattgtttttaagtaacgtataaacctaagtgtctcaatagaaattgtgagaaatatttatttactgcgagagaaacattttccttaagctttcattgttttaggtagtcttcgttttcctgttccccatcctcctaggttgaattccctgattctggctggcatgctcataatttctatgatcacagccccattgtctgttggagctgagggcattgtaagtttttgtaagcagcctttgataagttttagaggtgtagagaaagagctctgtctcctccctgggagaatactcctttccctacacctcagaggaccaaatcatgtctttattaatatgaagcattcattccagtggcatattttattcattacaagaggatcagtagtttgagcaatcagagatgaattctaatatatggaatcctttcccgctgagcttccatgaaagcatttgatcctttttggcctgccccctttgagctggctcctttattaatcctaaaggaccaaggtgtaagaactcaggcaggacaactgtctctttaggcaaacccaggctttgatccgcttccctgacacagtgatctcacctcctttggctcagtcctctccttcgtcattggcccagctatgagtctggaagtccccacagtgccttctttgggtcaatactattatcgtgcacctgctatttgcctggtgctgtgctagagactcaggatacagatgtgtagagggaagagtgtttattcttgtgaccttatcatggagagctttcagatgagatttattcctaccaaatttattatttgagtgaaactgaacagttccattctgataagtaagggaagaaccaggcatactatgttgctattctccacgatctgtgttaaggtttctgtggatgtgtgtgtgtgtctacttaaagaaatggcagtctatccctcttacatcctcagatattcacagagcccctcagtgacattttttggcctaggctttttaacattctagagtagaagagttgactggtaggaacatttctaagtgctcttttgcaccataaagcaagaggagtgtagctgttaggggaacttgagaagttggttagtgtgtaagtgatgtgagaaaattctaagttttccagtttaaaaatggagacaggagggaaatggccctttgttaagaaaataatgttaaggtattaagaaaacaatattaaggtataaagaaaaccagagacatgaaacagaagttggactctgagagtcttggcggagatggtggtagttttagcctgcataggtctgggataggagtcacttgctgtccactggcatcagaggacacaacggagtctttgatgtgggtctgaaatgttacaacttcccacccccacttaaggatgcttggatggagaataagagatgtcagttgtgttctgaaaaccctaacctagatataccttcagccaaaagagagacatgctaccatggttatcatccaaagccactctgtagaatatagcccaaacatcactgtgtattaaaacatttctctttactgttttcacataaatagattaatttatacagatttgtatttatttacatatttgtgtatatgctgcactaaatcctcactagtgggacattgtttaggaatcctggtacagggtgtagtaccaacaaggaaaaccttcttattaagctcagtgtcacttgatccattatatttaatgccaggaagggtatatatacagatttagaaattaccttatttctttgtcgactgagatgggtaatctactcaataaccatttaatgacaatgcacaatgttccaggatgcagaattgaatagcctagcctgggtcgctcccctctgagaagattacagtgtaatatgataattattaccatagtgctacccctggggcagaggacactcagagaaggggtatctgatttagacatggggatcactacagctgcctggaggagaggaagcttaaactgtgttgggaagtgtgagtaggacacagattggtaaggtgggggtggagaggtattccagaaaaagggctgggcatagggaggcttgtagcaatctacaatatttgggaagctatgggtgggttaatactacgggcattaagtatgctttgggagggagtgaatggggataggattcagggcacagctgggccaggtcacgaagtaaataagatcagaaagactttgaatagctcagtcaggatggagattcatcttgaaactaatagctggagaccttgattgacttgagaaggaagagaatcatgtgatcctatttacacgtggaaagatcatgctagctgtcatttggaggaggaagtagttaagggcagggtagagataggcagatatcatgagataacctccatgaaaaaaaaaagggtgaggtggcacaggtgaaagtaaacttaggaaagtaaagccaggattctaatgaaagatgttattaattaaacttactgtttaggaggatgatggagaaacccaggtcctggcaaaaacggtcacactactttaaagtttgggactaagaaggaaatgaataggatatcatgaaagtaggctctgtgattttcttagtttgtagggagatggtagaacttagtggttaagcacttgagctttgagctctgaaagatgtgagtggattcctggcctgatctcatactagctgcatgaccttggttgaccttcagcattctcatctgttgaatggggtaataataatatatgactccaggagttcttgtgagaatttaatcagaaagtacatgttaaatactttttggcacctagtaagtgttcaataaattaccactttgcttatttttataattggtaattaaaagccagcaaaagtatgcttgtagtggaaaaggcactacaggcacaagtactaatggggcttgggctgccaggaaaataccctgtgatctccttctgatacctggcacacaattttcagggatcttggaaaacgtttacctcatatgcaagtccatgcatggtaccagcaaacagggatccttgaagaagtgaattcacagctgtctttaccttctactatgtaacagaatgtgagatagagagaaggagagggaggagagagggagggagagagagagagagagaggagagagagaaagaaagtgacaaattagattatggaatggaaagttacatttgggaaggtgaagagttttgtcaagtatcttagcctttcttagcctcattttaaaatgatgttggactaagtccagctgcaaactgacagcccatgcaactagcacgtggaaatattttaaaaagctgagccaacgtttaaaaattggaaatttgtcaattgaggtagcttcttccataataagttcatttttattatttattcaaagctaaataattttattcaaaaatagatttctggattctgttgaaaaatcctaagatctggccaaccaggctcctgctcttccaagggcgtaagcattgctgccccttttgggcaaagaatcaggtttctaggtcctcaaggctcatcacttggggtgtgtgctggtctctcatgccaggtccccttctcttatttgcaaactgtctctgtttgatattaaaatttgtaatggggaaacactcactggtttctaaaaccctatgtagatttaagtagttgatgattctgtgaaaaaaccaaataccttctagagaaaacatacaggttgggcagagcccaggtattgatgtccttgatgaaactggtttttgtattctgaatgttggagattgagagatccaaagccattctctaaggttgacaccaaggtgcaggtgaaaccatggggggcaggtgtggggagaaagggaaggagttgaaggaagaaatctacaattactcggaactccacatccactcagctgctgtagaatatgagttgagaggaaatgcagaggagaatctgctgcataggaccactggaatatagattgtgttttggaaatgactgatttatcaggtggaagcagagaatgataagccagctccatgctgttctctcctttgtcatgttcccctgcccctggcccttggccttcctctcacttccctccctgacaccccaactccatgcagcatttgctccccctccacccaactcctccttgctttcctggcaggttcaccaagaaacaaccgggcctccatggcaacgtgaagacagctgaaaaatggcagctaaatgcagctgcccctcatttaatatcgactctggcactgacagaacagataatgggcaataacacaccattatgttgtgggaaaatgaaatgcttcagcagaaggctgtcatgctggggggatttatttgttactgtaccagcaccagtttctatttacttcccttccgttctttttgttccctcatttccatgccagtttctccctcctcctggtttctctcccattcctcccttctatagcttctcttttttgtacttcctttccctcctcttttttttttttccttctctctgaatcacttatggatataccagaaagcatacatatataatgcaattatttgcatgatgacttacaagttccaaagcacattcaaatacattgctttttcatttggagggtgaggcaaccctatgaagacaggtagggcctagacactgatgtttattttgcagatttttaaaggggctcagagaagttgaacccaagatcaggcaagtaagtgtcagcagctgcattgcaagtcagattttctagcccctagacaggactctttcctttctacgacatgaaaaacttcagagtcaccaatttctacccactttactagcaccctatcttcttactgaataatctgcaggtgcagagaaagtcttctaggctttgagacttcagaaggtctttagatctttacttatattgccagtcacttacagattcttccagacaagtgcctttgaattgttgataagattggtttatttttgttttcatttttactctttaaacccaagacgtctatctgctcattacctcctattgcatcattatataatcatgaaatcttggtatgcagaagggcgtggtgtgctctttgacttgaaagtgggggcattttggtggccaacagctttctgttttgcaaaagaccgtggtacattgaggtccagaggacatcactgatggacttggcatgaggaaaacccttctctaagttgttgctgtagtttaaacttgctttcttacatcctgttggttggattgtcatagcaccctcatcttctgttgaaatatcatttagtagactctaaattctggaaagatctgagatcaagtttcttagttctttgggtcttgaaaggattacaaatggagtgagaatggctattgcaaacatgttttcatttctagttatggctggtgagggaagaactaaatgtcaaaaaatatatgtgtacatctgtagaaggtacagtatgagtaatgaatatagtggttttcaatcatatgaaagaatgatttatattgataaagagatcaatgtttgtacttcccagcaaatattttttaacctgggatctctgagccccttgaaaacatgtgcaaaattttgtatggataaggcaatgcagtgcagtgtttcaacccactgatgttgaacatactgaccaggattttggctctgccacttgccagatttgtagctttagaaaaattacttacactcttcagggcttagatttttgaactagtctggtactcagttgagatttgctattctgtattgtttcttttctgtctgtaatgctttgttctcattcctgcatactgaaactcttcctgcaggtttttctctctggcagccatccccagttttagctgtggaaactcaagtaggcctctaacaaaatgttctgtggtggtgagaaagctaaggaaaaccagctgctaaaattacagcaagtctctggttgctgttgcttggtttctttccctgtatagttatttcccgtgcatggttcctcaaagtgaaatgaaccttagtgtcatatcacataatcatggaatgttagaactggcaggaaccagagatgattccatttctgtggtctgccagttcaaatccttgctgtgtagaaagcaagtccttgaccaaaggcctgccttgccaatcagcctccttgctattaatatattgtccctctgactcctttaacttgtttaattgcgctaagttcttaagtggatttactgccattccttatccagatctgaggctgtatgatataaagataactagtgtttgtttagtatttatgccattttagtagttatattttattcttaaaaagtaaaagtgactggttcaggaaataagtactctcaggattgagacatatttttacatgtttcattattttgataaattttaaaattagattttgtattaagaagactgttcagaaattatccccattatctcatttttattcattattcaaagaaatgtaagaaaataataagccctttatctagctattggaattttggaacttccgaggcaactgtgaatctcaagttagccagagaaaagggggcacagagtctttaagcaagaggagaaaactgtctcacaaccatagtttttttttttttttttttttttttcccttggaaaggaatagagctagccagaggacttagggtctagtttccataccaggtgggagggttagagacagcaagtgaaattggtggagaactttggaagttgtcaaatcttcattgagtgagaaaaataaagccgggacagaagtaccccaaggaagaccacagaaggaaatcctaacagaacatacatagctcaggagaccagaatcttttaggtcaaaagcaacaacctcaagagaacttaagaaaaccaagtgcattcttaaaccagaaaagtacactcagaaatcacggagaactcaagcaaaggactttcaggcaccaacctctcttacaagctctattatagcaccagtgaaataattgatattcatgaagatcatacaattttagactctttgggttggttgtagcttagagattatctagttcagggctgctcaaggtgtttcctgcacatcagtgccgtccaagagctgtttgttactaatccataaggatataaatatggaaactgagagtaagcatttaagcacttttgtagtaattccatgtgtgggaacacacaggtgagggagagtggactggtctcattcaagagggtgtcaaacagttcagcattttaaaacttacttggtgagtcatatgtggcatgagctggtagttcttcacagtagggcatgtattgatctgaaaggatggaaaaatctaaaaaacaaaataaaacaaaattggctgtttactaaaaagatcttgtgaagccccaatctagtgaaaaagcctacttttacatatgaaaagatagatgatttatccaagaaaatataaaaagatgatggcagaacccagaatatgggattaataacattttattaattaagcaaattatgcccaacatactctgcttcttaaaataggcaaagcatgcaacacattgtagaattaaaaaaaaaaaaagacaaacatttgagacctgtgggctcttaaaggttgaatcattcctccatggacttcacatttcaaataagattttgctatatatacacatacaactgtatcaccccacagaaaacatattttgcacttgaagtttgttgatctcttggggcattattttgtttctgggaattcttaaagaatataaggctatgctggatggcaattttctgggtcaattgtgcccaaggcactccctacagcaaattaggtaatgaaacaactcttgtgggcccttatgatgcaatttagggcactatagtggtaatagactagctgggggctcagcagctagtggaactctagggacctcaaagcatgactaagccttcttcagtgcccagttttctgccgtgggatggtgttaggcccgggaagaacagagcctaaatgcacccctctacccacttccaccgggatcttgacgaaggtagggatgctcctcgtatttccatggttagattaggctaattgtcccttacaagttgaggttttgaaacaactggaagtggatagaatcacaatggtcatattaccatgataataacaatatcttacatgtataccattgaacttttatctcattaggtcctcactatagtctcactataggccaagcagctacttttagctgctttgtaataagtaagccaaataaaggctcaaagattgaacagatttattgattttacccctcagttaaaactaagatccagggccgggcgcggtggctcacgcctataatcccagcactttgggaggccgaggtgggtggatcacgagttcaggagatcgaaaccatcctagctaacacggtgaaaccccatctctactgaaaatacaaaaaaaaaaaaaaaaattagtctgttgtggtggcgggtgcctgtagtcccagctacttgggaggctgaggcaggagaatggcgtgaacccgggaggtggagcttgcagtgagctgagatcgcaccactgcacttcagcctgggcgacagtgtgagactccatctcaaaaacaacaacaacaacaataaccaaaaaaactaagatccaggatgggtacagtggctcaggcctgtgatcccagcactttgggaggccaaagtgggaggattgcttgaggccaggagtttaggaccagcctggacaacatggtgagacacagtctctacccccaaaaaaaacaaaacaattagttggatgtgggcatagtggcatatgcctgtagtcctaactactcaggagactgaggtgggagactaaggcaggaggatcactggagaccaggagtttaaggctgaagtaagctatgattaaatcactatactccagcctgggtgacaaagcaagatcatctccaaacaaaacaaaacaaatcaacaaaaccctcagattcatccccatgtctccatctctactgtcactatccaagtccgtgccgccatcactcatcacctgcataactgcagaagcctaccaatagtctccctgactcactcagctcctccagtggattatttacatagcagccagagtgatctttttaaagtataaatcataccctgtctctctaagcttaaaaccctttaatggtttccatttttcttaggataaagtccaaacttcttggcaaggtttgcaaagcccagcaggtagcacttggccacctctgcaacttcctcttacactgctctcttgttactcttggtgcatttgccccattagccttcaaattcatcaagctcttttctgctctccctcccctcccaaaggctaactcgtactcatttgcaggtttccgtttaaaccctgcttcttcaagagcttccttaattcttcatctaaattagctccttctactttctctttcctcttattccaccctgatcttgtctccacggagtttttagcacgattcaaagttacgtccatctgtaggcttttctttgtttgagggccgtctccctcactacaatgcaagattgatgaggacaagccctatgcagctttgttcaccagtgaatattcacacatagctctctgcttcagagttctcttgctataaatatgtgataaataaaaaatgagggaatgataggcccaagagggcacagatgggcaagggtgatgtgagataatgcactctgcttctgaaataattcctaattacctttggttttgttcttaaaacacaactggagttcttagaagaaatatgcaatctggcatatagtaagggctcaataaatgtttgaatacatgaattaatatgtaatgaaagaatgaatgccatcgttacaaattagctgagttctccatgtgtttgtaatattaggatattactgtccccaagttgcattatcgacttcctggctttcagtgggcccagtgtccccacatgcctgctcaccccccactgcactaacctaaataatctctgattattttctttttctcttgctactaccaaattctgttctgagtgaggaagcagcttggttaaaaaacaaaagccctgatatgtatatatattttttttcctgaagaataccatcaggatgaaggctatgattaatacacataattgctacaaatggcagctaactgcagaaaaccacctcccagctgttggaggaaggaaattgctgacagccactccccattgggtggctaccaaaagagaggagctcacaggagcaggagagaatacacatctccatcccacgtgacccatagagatgacccatagggctctgtcttacatgtgagctttgccataaaatggtagtgttaagagtttttagggctggggtttacagccaggctttccatggctggggctggttttataggacatgctgtcctgcagaatgaacatttagaatccctgtggcccagttggtattactgcaaaacccaggttgaatcccttcaggaggagacagatgattcttggctggtcagatttcttctctcatcctttccttgttcatttgccctattctaatgggatggggaatgcacaaacaaggaagaagctctgggttgcttcttggagtctgctttgtgacctgagctcgacccttcactttcctgggcctcagtctcttcagtctataatgtgaggtgttagactagaagatcactgtttccttaattttaagcatctgtgttacaaaacatacgtacaaagtatgtgtacatatcatattaaaatgtatataaagttatatctatatctgtctatctatcatctattctctagtttctattagcttggtgcaaaagtaattgcggtttttgccattgaaagtaatggcaaaaaccgcaattacttttgcaccaactttgtatcaattatcacctatttatctttcaacgattattcatcatctatccatccacctatctatctatttatcaatcaatcattcttatgtatctccatacccccatcttctctgtctactgttttacagttagcacccgaaaagttatttgtacttgtgttagtgttaacatgtgtctggcttaactagtcccttgttcaggtgcaggaatttatcaacatataaatcagaagacaaaaaacttcaagcctaacacacttaatgcacataagcttctccaggccaccacttacagagttgtgctatacctttttttttttttttgatgtggcaaaaacaaaacaactcagcagctaaacagatgaaaagccaagctgtgggctaaggtatgtatttgatgaagctctctcttctctagatctttagtgggaagagttttgccacttgacacatatttaccccgcaaacctacactggcaatgctaaggcagtgagcacagaacacaggcctgaagtgtgctggaagttagctgaagggcaatgtcagcgcaccagctttgaaattacatgcagcgcagtcaccgtccctctggaaaactgtgcattctgtgaatgctgactctggaagtgcacacgctgagcatcagggctggaaaacagctgagagagaatgttctcccaggagaacaaaccttagcgagcttcctccatgtgttctgtacatctgcatcatctcatttcatcttcaaacaatccatgaagtaatgcagtcttctttatatggtaggaaaactgaggatcagaaaaattaactgattttattcaaggataccctgttagttgcagccactggtggtaacattttttagtgctttggtgccaaaaaagaaaaaaagaaatttttgtgctccaaataaaagaggacttctgtagaaattaaaataaggcattattagaactttaggaattttgcttctttctttgtcctctgattattcctgtgactttatgtatgaccccttaatgcaatggctgtgttctaccagttgatttggacatgtacatagttgaccttcaaacccattactgttgcatccgagactatccccttgaggagttccatcagggagggaggagcatcgtctagaagtcagaagtctttgcctgctgttagtattctccacagagctcctcctctccctcagttgagggtcacaggatgttagagaaatcaaaagccactggacatcagggaaagattgaggagcctgttacctgtcaccttttcatttagacggccttgcttctaaaattatattctgaattttccatttattcttgctgctatagactgaatgtttttccccctcccacacccactgttcatatgttgaagccctaatccccaatgtgatggtatttgaggtaggtagggaggtaattaggtttagatgaggacatggggatagagcccccttatgggataagaaaatgattataagaagagtgctcgatatggttaagctttgtgtcccacccgaatctcatcttgaattgagattcccataatccccataatccccatgtgtcaagggagagaccaggtggaggtaattgaatcatgggggttgctccctcatactgctcttgtgatagtgagtgagttctaatgagatctgatggttttataaggggctcttgccctctttgcttggcatttctccttcctggcgccttgcaaagagggtgccttgcttcctctttgccttccaccatgattgtaaatttcctgaggtttcccaagccatgctgaaatgtgagtcaattaaacctctttcctttataaattacccagcctcaggtagttctttacagcagtagaaaaatggactaatataatgcccttagaacaagaggaagagacaagagtcttccctttttctcggccatgtgaggacacaggaagaagatggccatctacaaatcagaaagagggcactcaccaggcaccgaatctgccagcactttgatcttggacttcctagcctccagaactgtgcaaaataaatgttggctgcttaagtcacccagtctatggtattttgttacagcagcccaaactggctaagatactgtcttgtaggtgaaacagggctaggagttattttacaggcataaagttacctgtttttacactcttgagaatcaattagtgggttggtatactaatggtagggtctaaaaaaagaagaaaaacaccaaatgcatttgaagcgattccaactttgggacactttttattatttcagacaaatgcagatagaatgtttactgaggtgtctccctggccctttatgtaatatttggatagcgcaatccttagctgcatgcagataatgtgttaggcagctagaaaaataacctgcttgtactgtttctgatttattccccctcctccctcacgtctttgttcacagtaaacacatcactgcagagtagctagcaaatgaatgcctttttatcagaggtacatgcccagttggtggctacgaccacatagaacagcagatatggccaaagggggaatcactgacaaaacaggcagaccctcacccagagtggatggtgtttcttggcatctgagaatcagaatatagaggaagatgaaagcactgtcgtgtttacggtgctggaaattatattgaaactcaagtaaaataatgatgctgctgctgctgatgatgatttgttgagtgtttactataggctctgatctggcatgctttccatgtataatttcatttatactttactacaacctcaggtgagagctacagttattatattattatacctattttataggtgaggaaaccgagacatagagagtttaaataacttgcccagtgtcacataggttaagaaccaggatcaagataagagctttcctcaactacccaggaaggaccaaacaagttaagagtctccagaatttgagaggaggaattatgattctggaagttccaatctttctctccagcttcagaaggatcaaccaatattttaaaggaatgtttaatccttgtggtatgagctgttggggtaagaaagaatatgggctggggtgaagattgaatatgagccaagttcagtctcattacaggactaggaagacagagaaataccaagatctagagcattgagggatattttgatgaagctctgttggctcttgcatggtccacatgaatgcaaagcattcattttttttctagatgagaggcacaaagaaataagacagcatttttcttttttcagtaaaatccctttagttttgactgcactaattctgtattttcctaatttagtcatgttaagctaaaatttacctttataccatgtaggttgagaggaggatttataaaacaaaaagagaaagtggtcagcctattctatcggatcaaatcagtaaattactaccaatcttcactacttcaggacaattattttattcaaataacaaatacactaattacaaatgaatgtccatttttaaatcacttgcaagagtcccacacacatttaacagagtggttttcttttctttaccttatgttcttggagataataaatcaacatttccctcagaaagcatttgttaattttttattcaatcataccaatcttttgcccaattaggaggcattagtgtaattttttcccattaaattgtacataagtactgtcgtccttgtttgaataattaactttcacctagatgccctatgtgtttcggttgatgtatttgctcacttgcatctgcggtttgctgtagctttgaaactactgacactttcaagcaagatggactaatgtctctgaaatgaagctggacatttggatttgtgacagtgagcttgacacttattaccttactaataggtagtaagcatataccaaaatgatttacatagagggtattagtacctattagtaccttactacctattagtaaggtaatatgtgtcaaagatttacatagagggtatatgcttactacctgttagtgctaagacattggttctgtcagatgaggattttctgattggcaactaaggaagttatgttcataatttaaagtgaaggggtgggatgggatagagctggatcaatgccccatggtactacagagtgagtgataacttggagaatattgtccccctgctccccacccagctgccagtttgactagcctttcaaatagcattcacttgtcctcaattctcacccaagacaaaacacccatgacttggaacaataaagcaaacatatttccaaaatggccatggcagaacagtgaaaaggtactttggtatatctcatgccacatttcacagatcttctgttctgtgatggtttatggaagtgaagtactttattatgtaaaattcatcctgttttttgtttgtttgtttgtttgttttgttttgtgatactacagatccatttcactatagccaaaggacatgcgtttggggtctggggatccatcagaggattcttctctcttcttctggtcccacaaagcaatcgtgagctttagaaaggaatcctaggaaaagtgaatagtcttccactgacatctgctctttcttatagcttacaatgaatactgcctcttaaagtgtcttcttaaagtggcacaaagagagcacctctgtgagtgcagggtgattgggcacgcagtaggagaagcactcagggttagcaagtgattttcctgacacaaaaccatttgttggcaagatctgtgggagaaacattctggattttgtatttcttgacctttccgtgctttcatttggtaaactttgcaaagcagaagctttatcttaaaagttgttgtggttttgtattaagctcttttgaagtaactgatatgacttattttgctttaagacttaaagtgcaatttttaataagctggtaccatttattaattacttactaatgatcccagcacagtgctttctgtatattatgtctcttcgtctctacaaaaaaccccaggacttataaattattatttttctctaatttgcggatggctaaactgaagcttaaagagattaagtaatttgctgaaaatcacatgacttctaaggaaggttgagattctttctgactccaaagcctgagcattatttcatcactgccttcctttatacattatgtatgttaattcaatgttttcctccctctcaggctacagaactcagatttcatgagagtttagagttctagtctccagagtttttcagtaacccttctctcttttcagtagaaagggagagttgttttaaaaatggataactacttaagaaaggcctttgacaatctctaacgtgtgaaaaattctttttggccactggcttctgatgactcaaattgtcagttgacttgtttgctaacatgttttagcttccatcactcccttccacagatggcatgaagaattggccatagtagataaccatgctacagtagatgccattcatttattgccattcatttatagcaaatagccattctatagcagatgccattcatttattttattttatttttattttttgagacagagcctcactcagttgcccaggctggagtgcagtggcgtgatctcggcttactgcaacctccgcctcccaggttcaagctattctcctgcctcagcctcccaagtagctggtatttataggcacacaccaccacgcctggctaatttttgtatgtttagtagagacggggtttcaccatgttggtcaggctggtctaaaactcctgacctcaggtgatccgcccaccttggcctcccaaaatgttgggattacagtcatgcgtgagccatggcacccgggctgatgccattcatttagagtagtcattctttcatagtagacagccattctgtagtagataccattttctatagtagcactaccccttaccatccgactagaagaagaataagtaagtgattagaaataaggctcctggttatagggtttgttacccaatgaacatgatgacttgattagcgtgccctttcagcccaatgtaggattttctatggactatgattgagagcagacacctacagatttgtttgctttacatatatagctgaatagtcaaaatgctatatccacctcaaatggagtcaggataagcattatgaaaagtcagaattggcagttgctaggtgatgtaatttgagggacttcatggagcataccctccaaaaaactcttactgatgcctgaaatttcacagttatgtcttgattacattggattgagcaacagcccctcctttaaaaaatgcaaattcttctcacacagggaggtagctattatgcccctgacacactgggtgcttattaagcactcgaagcagaacagaggatgtggatggatgaggagatggaaaaagttgtgcagtgaacagtttccctgagagctggcatggcaagaggggggcggtatgcccactgcacaggggcggggccaggtgctggatcctgcacagtgggaacatgctcccctctgccatcttttgttgggaagaggctcacacagcctttccagaagagaattgcaggaccaagcaaggtgaactgggaaagagaaggatctggaagtctaggatggcaagatagattggagagcaatacacagacaacctggggaagagacctcgcctgggtctgaggtgatggggtgggagccctggctctgcatctggctagctttgtaacccagtcccacgtctactgaccccttgacttcctgttcctttgtgtgtgtgtgtgtgtgtgtgtttgtttgtttgtttgtttgtttgttttgagaaggagtctcgctgtgtcacccaggctggagtgcagtggtgcgatcttggttcactgcaacctccgcctcccaggttcaagcgattctcttgcctcagcctcctgagtagctgggactacaggcgtgtgccaccatgcccggctaatttttgtatttttagtagagacggggtttcaccttattggtcaggctggtcttgaactcctgacctcaagatccacccgccttggcctcccaaagtgttgggattacaggcgtgagccaccgcacctggtccctgttccttatctttaaaatgagggcatttgactagggacatctccaagtttccttctagttatgaagaatacatttttttaaaattgtactggaatcttatgagaaacacgagggattattctttttgcttttaagatttatccatgatagagtataagataagccatgggacttgcttctctcccaactcaccatacccaaaagatattaatcttggtaagatcccacaaccaacactatgcttttgcaagagcatccaaagttgtgattttgggttttgttttgatttcttttgttggttttttaatttagcttgtgactaatagaaaaccagaaatactaatctcttacatcaaaggaaggttactggcaacctccttgtactctccagggaggcatggttctcttggacttagcctgggttgtctgcatctgggaaggacttggacaggaaagagctaggcataggagctgaaagggaaccttcttatcttcagactgggaggacacaggttatatcctccatcagaggtgtagaagaaatgatgctcaacaatcagtcacatcctcagaacttccccaggcttgcatccctggaaagctgaagtagtctttggggcttcagagaaggcatcaattgatggatctcagtccatgtgtgtgtgaggctcaaggttacctggcaaggcagtacagggcagtagtaaagagtgagtaaaggatttggggtcagcaaaacctggttttgatcctcgatgctacctctttcaatggacaggttaccaagcctcaactcccatgtctgtagaagagactgtcacaacacttgtctctgagttgtgacggctccacacaatagtccaggcaaggaggtaagcctggtgctcagcattgaccagccatctagaattggtcattgccattattattaaacagtgcagccctatggccagtgaaaaacaacttttaaggcagcaaggcacttgcagcatccaatctggggaaccactcagaaccccggaaaggtactccagcaacacctgacccttctcagattcacttccctttacatagcttgttacgtggtgagctttaactacagtgcgcagctctcatctcttcaagggtgggaggattgcactgcaaatatgtctaaaaaggcacctgtgtcaatatagtttgtgtcatattcaacagggagagcaaaatgaaatgcatctttcacagatctgtagaaaacaatcatcatgggtgcttcctaaactccatccagagagttaaaggcatcaatcgttattattttttcccttcaaaatacatataaagaatttaaaaatacatataatttttgacttcaggaatgtatgtttgtttacaagtaattttattgcaaaatatcaagaatgttctgacctctatgtgaatggatgtacatatatctccccaaagtggtctatgtcaatgtcagataaaaagtcattcatgtatttcagatgagatggaagaggaaagcaatttgccaagtagtgatgacataaaggaatgtgcttatagggtcttcagagggctatccctgcctggagggtttttgagggtaggtaggaggccaggtggttggctcctctgttattgaaaaaaggagattgtctttcagagagcactgaggcctagagcactcttatcacttggaatgcccgtcagggctcacagagagtggagaagcattttatatatcacaagccattgcatgccataacttctccttcttttcttgtcctctttattttcccctaccagcatggctctcagatttattaacagccctttcatgccttctacagccatcaggaagagaaataaagaggtctgggagaatccaatcttctttagcttgtcctttttcactctcttagcttttttgtttgtttgtttctctttccctcccttcctccctccctcccttctctctctctctctctctctctctctctctctctctctcatttttattagactgctctgcatcaggctagagtttctttttcaatttccctcttctttcactgtttttaattgtttcagtgcctttgtttttccctagacttgagcacagtgggaaaggtcagctgtcagaagaggggctgtacacagctgataaggccttcaggagactggattggagtcatttaggcagcattctctccctgaagtcatagaggctacactgttgcagtggaaagaaaaaaagagctcaatgagtagaaaaggcaacttacatgaaatgagcagcttggctatgtgagcactaagcagtgcattacttacccagagcccttttccagaggcaggtgctgcccagtgccagctccagtgactctgggacgttgatggaaatgtgaatctggatgaggcacacatgcaggaggcttggagtaaggactcaactgggaattaggaatctaacatcctggaaatcaaagttgtcccctgttaatatatctgcttcatggttattttacaactaatgaacttatataaaaatcagaaagcctaggttctggtcttgggtatattgctaattactttgggaaagcatgaaactatactagccttgtaaaaagaagtagaaaatgtgtggtttttaaagcacttttcatagataatatctagaattcatcttcctgatatcatttgcaaagtagaagtgaggagcataccccttcttggacatggctatgaaaaccagttaattcctttttatgtaagtaccttgaggtaaacccaaagtcaaagcccttggaactcatccaaatagcctatgcaaaaattcatgatggagtgctgcagagcttttaaagaaatggtggtcatcttctggaatgggaaaaagaatagttgatatggataataccatagcattgcagagttctttttttttttttttttaagagaccaaatcttacgctgtcactcaggctggagtgcagtagtgtgatcatgactcactgcagcctcgaactcctgggctcaaacaacactcctgcctcagcctcccaagtagctgggactatagacacatgccaccgtgcccagataatctttttattttttgtagagatagggtctctttgttgcccaggctggtctggaactcctggcttcaagtgatccttctgagtcaccaggatttcaggcataagccaatatggctcagcaaattcttcatgttttcaaaacaatttttttatacttcacaataacctgatttaaggatacttcctaccataatgtacctgaaaaatatgacatgctaaaatgtgacagaactcctgttttcactgtcaacctggcacatgacaagtgttctcaataaaggtttgctgaatgaatgaataaaattattgagtgagtgggtaacttaaagccttcaagtaacacacagttaactatgtttatttggctctccctggccaaccccagtaatggttgggtacaaagaggaattggggtagataatgttggccataaaggatatgtaatctggttatattggtagttctgctgtcttgccatagaaaagggagccaaagggttttaactagagctctgtcaccttgggagaaccctcgggaaagaaccactgtccaggctagcagccacagaagccctagaagatcacacagtgaattgcttagcttctgctctcactgcagtgccttttacccaaaacaaactcttgttttggtaggagaaacaagaaggttggagttatacccaattctagcttcattctaaattcccttgtcaattattattctaattggatgaccctggacccctaaatctcagctcccctccttgaaaactgtcaataataatacctaaataggttgttgtgaagattctatgaaacattaatacaaagccagagctaaagccctgatacacaataagcttcaaaaatggtagctggcatcatcactatcatcacccccatttcaagggctctgggagtttcctggtatgaaacagtgataatgatgcttactgtttaaggttatagaattgaggagactatttgtaaagggcctcttgcgatgacaggcacgtaatagagaaaaaataagtattggctcctttctctctcctttcttctatgatgtcttcttacttttctactttagccgaggtagtggtacatcattactctttcataaagtgacacaatgtcattgaggaatgctcaaaaggccccagcagatggatgctcatagctggttgaagcagagttaggagggtagcatggaggggaaggaggaatgagcagcactcgggaatgcaagacagatcttttctgccaaacctggatgcactggaggctgccatcctaaagcttttgtgaagtttctgcctgtttctggagttatccatgtaatccttgagagaacacttctgtttgcacaaatcattccatacaacgtaattagctacttataatacagaggacacttgtgatcccaaattcaaacaattgcaaaagcaaaagcagtttattcatggtggtgtacaatgataattgataatgagctagatgactgtgaggtgctatggaatctcaaagactcttctgaattctcaaagggagttcaccttattcataggatgactttaggttagcagaaaataatgactttaaaaagtattataccataacaatgaatacattacttatattgttcatgtaattactagttcttcaaaaaccaaaatgccaaatttacaatgattagaaattaatagctaacaaaaacatcacactaactcgatgccctttatttgccaatgattctagctaatggagagtttttacttgatgtgctttattttttaccttctgacatctgatccatgtagaatgaccagccttcctggttttctaggaaccagctattttagcactaaaagtcctagtgaacttctcatttctaggcaaattgggatggctggttattctacttgaagcacctggtggacctcttttcaggacagcaccatgtttagactaacatctgactgacaactcaaaacgaaaagaatctctggttccagattatttataacttttggatcttgttgatgaagaaaatttttatgaaaaaagaaaatagagttgactacttttctatttatttaaataataacattaacaaattttgtctatccttgccatcattttataagacaggaaattacaaaaccaaaaaagtagaaaggagtagaatgtaaattttacaagggttccagagtgatgtgtttatcactatgttcccagtgcctagcagtgtgtggtgtggcatagatcctacataaatatttgttgaataaatgcacagtgcataaatttagcttttactacaaatgtactacactcttcttatttttctttctttctttcttttttttttttttttgttgtttttgagacggagtctcattctgtcacccaggctggagtgcagtggcgcgatcttggctcacggcaagctccgcctcctgggttcacgccattctcctgcctcatcttccagagtagctgggactgcaggtgcctgccacaacacccagctactttttctgtatttttagtagagacggggtttcaccgtgttagccaggatggtctcgatctcctgacctcgtggtccgcccacctcggcctcccaaagtgctgggattacagacgtgagccgctgcacccggccatttttctaaatgtattatagattgatgaaaactttcccttagaccattgcttggggatcaatagttgaaatctaagtctgtggactgtagagttttttgatagtaagtttttattgtaaattattttaatggcattctgttgtttatcctagtctcatgttcattatagttggtgtggtcaacctcccatgagataatcattcagataagaccaagtttccgggcctgtaaatcagagaatcaggttcatttaacatcctcttagatctcaacttctatcagtagcaagatacatctttgcagatacctacatggagatttcactacatctggcagggatgagccaccggtcctcattttcttaattcctggacaaggtttttgtgtattctaaccaagtattcttgcttttctttgttctgattcattcatctacaaagtgtggtcagaaaccttgaccaactgctgatatatacaaatatcacaacttctctaagtctgggatctcctaccacagttgagatatccaaatcattcacagttttgtcataactcgtggattaaaaaaatcattgataaatcatatccggtatttctgaagaggtttagaattttggtttcatggatagcataggaaatgtaaattatccatcacaaatgtctttacaagttacaaaactaaaccaatttgagtgttcatttcagagaggcttaatactctcagttttgttgtttcttttaatcacaaatcaactaaccatttccctttctgcagctaccttgcacaatccctgagcatatttctgaccttagccctctggtgtcatagctctgattctagctgtttggctttggatggggttgttggggtgttgcagcatctgtaaatggttaaaggagcattagactcaatgtatcaggctcatgcctgtaatcccagcactttggaggctgaggcggcaggatcaggaggatcaggaggatcaggtcaggagatcaagaccatcctggctaatttggtgaaaccccgtctctgctaaaaaaaaaaaatacaaaaaattagccgggcgtggtggcggctgcctgtagtcccaccttctcaggcggctgaggcaggagaatggtgtgaacccaggaggcggagcttgcagtgagccgagatcgcgccactgcactccagcctgggcgacagagcgagactccgtctcaaaaaaaaaaaaaaaaaaagtggatttccttatttatgctctcataattaagataattttagcatttatatcgtgtagtgaatatacacaattcccatgatttttttcctattgttttatgatccgtatttatatcccaaagtatatggttaatacctctaagtttttgctgaaaatctagccttgttgagcagatacaggttcctttagcagctggtgaagggtgcttatactttaaaaaatcagataatgtatgtgaaagtggtttggaatatgtgacatgctatgcaaacgtgtatttttttttttaaagaaatgaatagctcgtctcccacaggcatattattgacaggggtctttgcaaaagatacacaaacctaaataggaagcagcatgatctaatggaaagcatatagtctttggaggttaacattggcttgtattttggatctgctttcaactggaaatattagaaggatttagtcccttctgagccttagttttatcatttgaaaaatgggctagtaaaactttatttcacagggcttttgtgagggataaataagaaatatacaaagtatcctaataaaaagttctcatttcagatgaaatatgagcatgtagatatgctatctctattaataattcatttgttctgtgttgttttgaactcttgtaactttaaatcactaaaacaggttaattcttgtcaaatgctatttacatcgtgtttgtttcattgaagcataatacaggttcaataaatgttaatttcctgttctttgtatgctatagcaaaaataaaaaatcttctgatgcttaaaaagactggtaatagtcggctgggcgtagtggctcacgcatgtaatcccagcactttgggaggccgagacgggcagatcatgaggtcaggagattgagaccatcctggctaacacggtgaaaccccatctctactaaaaatataaaaaaataaaaaattaaaaaaaaaattagcctggtgtggtggcgggtgcctgtagtcctagctactcgggaggctgaggcaggagaatggcatgaacccgggaggcagagcttgcagtgagccaagatcgcgccactgcactcagcctgggctacagagcgagactctgtcaaaaaaaaaaaaaaaaagagactggtaatagcctgagatgaagaaatgacaaaaatgaaataaatactttcttctagttttatgcaccatattagtactataattgaatatgcaatcactaaagattttcttctttatttaggtttcttgaatcaggtcaccgatttttaagtctgcatccattttagagaactctccctccccactccccttcaacatatcccatcctctttcacctatccattcagattctttcatttaattatttcagaccctgggaattagcagtcccttcttgaaagcattggaatggggcagttttaatttttattagtatcagctttctcctcctcactgccatatttacttctttgggaggaaaaggaagtgcatatgtagctataaaagaagacatagcccaggtttctaggatttgcacctccgcattggcaaattttcccagtctgtgtctccaaacagggttttaatcacctgggctcttgtccttggcattgaaagctttaagagtactgcagaaatggtaaattaaccacatttaacaaaatagaaagttttcattgtgtcataaaaagccctattgatcttgttcaggcattgactccaggtccttttaacaagccactctgtctagacttgcaggctagagcccacagtgctaacaaaggaggagctgggctgccctccctccccctgcaggggaaggctaagaggatgggcacagattcaggcttctcaatggggattttcttaaagaactagcatgattttattctgctgtggaaaggaaaagcattaggagacttgtggcagatgtacctgtcacttactccagactccagccttgtttgactctctgtgtctgctgtggaactaccccatcataacagattaacgtgtcttccatatccctcagcttccagcaacatttcctcctgttgcccttaggaaggtaggctgaactctgatgccaacgcacggagcagtgggtctccagaaagagcgtggaaagcaacgatggggcaggaggaggaattggcaactttagaatcactgtgaccaactcaacttcatttcaattcaattccacaggtctttacttaacaaattctgggtaaacaggagattttgaaaaggcaagaaaaattgctgctcacagcgtatggttaaaaagttgacatccataaatcaaataaccaaagaatcattcaagatttattgggcggttagacgttttattggcagcagagatttaacttttcaaaaaatgatgaagtatttcaaacataaaacatgtagaacctatagtagaggatattgcaaacattgctttacccatcactcagattgaacaaatcttaatgttttgccatttttgctttatatctttttgtaaagacttagtcatgttcgaataccttcctggttccatttattctcttcctcctccaaagtaaccactacctgaagttgatggggagattttctgtatacatatttcttattcttgttacatacaaatagagctgtagtatcaaataattagtgatcactatatagctatgtgtatgtatgtgtatatatatataaattagtgggggtcaattttatcagcccctcatcatttatattcattattctctatatattctgggctgaaggaaggacatgttaagtaaaattctttaataccttatacttccctgttcatcacccaagcaaaacttggtaccacctctagatcccactttcctgttttaggatcagaaagcatttggctcctaaaatatctgtaggaagtttcacataatatctgattgtcttgttttctctagatacttaaaggtggggagttttaccaaaaatataatctaattgcagatttattaaggcaggaagtagattacattgtcttctaagatttcttctgatactatggtgataattgttacagagaattctttacttgttttcatcttgggctaaagagatatttgatagaaataaacattttaaagttcatatggtaaaaaattcatacttattgctttgaaatatctaaatatctgtatgagttttcccaaattctgtaaaccttcatgacttctatattattttctaaacatgtatgtgtgaatatagtgagtatctaattttggtagcaattagtgttgatatgtgtgctactgtatataaaaaacatttcagatgctctactttgggctctagattcattgtggatatttttcattattattaattttgtttgtatgaaaattatacaaaaatatacagtgttactagggacacagacctctcctctccagctctgtgtccctcctaacatttttgtccttatgaagtccacagaatgtagtgtgacagcatggcatttgctattccagtataatcgccttagttattgagtacttttgatgattctttttggtcttggccaagggtgaaaggatatgtaagtttgtgagtatgtatatattgtacaattttttttgttcaaaaacttcaaaattctatgtgaaacttatttataggaagtcaattctggttaagttctccaccatcctaattacttatatactctgtgtaacttcaggaaatgtatttttaggaaacactgtaggctagagctggctttgacattattgatatattttcttgtcattgaactcatgtggctccagatgtgcctattatccctccagtcacagtgaaagcaacccaaggaccagtttgatatcctgaatttctcctgatacttttattttggtgcctatttcaatatttgttgagcgctgaggtgacaaccataacatttccctctgatttctgaactgattgtgtaatagacataagagtcaaatcataattgtgtcaaggatccaaatatcagttctattgctggtagagttagagcatgtggcttttactgcagtaaaattgggcttctttataatttttcctttgaattaaactcagctactcagcaacagttagaagagccagaaaactgcaggccttcttccataagggcagagtttactgtggtaaggattactgcatgggactgcctaaaggagaactcacaagccttgtagaaagaaatagagtaaaaggcaggtcacctgggaatagtgactatctaattacgaaatgtagaactagggtatcagacccttactacagcaccaagcagatgaatcactgcaggagaatgaataaaggagacatggtcaaagtgttactccaaaatgatctcttctggggaatggggaggaaatgttctcgtggagtcacgggggcaggaaaatggattcccctctgtaagacggagtgcactatttgtgttcaatgcttgtttgattgactgacccataattaaaatgagaaacgaatactgaaagaagcataattacagttttgcttatatggatctggtggttgacggaaagtaaaatatacagtacattacataaattattgtaagtgggaagacaggcatgtgcagtacaattggcccaggttgtgtatttctttttttattttttatttttttagcaatatccgtcctatcttagaaatgtctcctggatccctatattacataaattattataagtgggaagacaggcagtacaattgtgtgcagtacaattggcaaacaattggctcatgttctgtgtttttttttattttttattttttagcaatatccatcctatcttaggaatgtctcctggctccctcttcacctctctagccatttgtccacccactggacccctggtacaatacaagtataattgtgccactcattagctgaatttcttctctgctaattccccatccccagtgctcaagaatgtagagaaggccccagtctgcatcttgagcctatacatgtgtccattgctctagccaccttgcacttttcaccttctcctaaatactctgtgctcttctaatgaccacaccaatggatatgctgtttcttctaattagcatttcattcctccctttgtaggtaaactattcataactcaagacacattttaagtatgacctcctgtatggaaacttctcttatgcccagggtcagttattccctcttctgtgtgcctatatcacctaccaaacccttactacactggtaattatttgcttgtgcataccttctcaacaacaatgatagctaacacttctatggctgggaactgggccaagaactttattgtattcctgcctcacagcaactctatgaaatatgtactatggttattcccattttgtagattagggaaagaagggttagagaagttaagtaataagctagagttccatagatttagataagtttcagagctggctgccaaacccgcatctgtctgattgaaagcttttctcatcacagttcataatgtaagtccactgttcaaccaggcagagtgccctgttaacatgaatccgttgtcagggcctggcacatagcaggcattcaaaattttttagctttacaatttcttttttttgtaaaatgtcagctaatgatttatacttacaaggttgccatgtgacttaagtgcattcagcactgaacacattacctggtgcatagtaggcacctgtgaatctttactttttaagtgaataaacaaaaatgtaacttttattgtaatgcagttgacagcaattcagtctttaggataccattagctttctagtgatttcagtgaagcgtggttttccaggccattcttctgtggacggaggcagcttccctcaccaggatgctggctgtttattttccaagtgacaagttgatttactattttccttctcatcactttcaagaagcatctgcaggctagtgagtgacccaggcagtgtggaaaagtctatttatttctctgctgcatctttcctacggagagtctgaggataagggttggaaatggcctcaggaggtcagatttcctgtgtattttcttttgtagtgcaggattgctcagggcgacacaatttcccgtctgctggtacactctgcttttaaaatacctgtgtgatgggatgtgtcaggtaaagaattttgttgtttgtccttgggggatggctctgcagcttgatctctcttaatgctttctttggccctaaaatacattgtaagggaaatgagacagggagagccaagagtgcagttcacttgtgcaatcttttgccttttaacacaatcattctgttcctccctaaattctagcaggaaatgtcattaagtgtacaatagaattcactccactaaaagaatttctactttcccctcacttttgcaaatatgatcatctcacagctcagcagataacttggatgtctgctcacagcttcctaagaggctcttagaggtaggtgttcctgttcagtatattggattcttagcaggttggatagtaaggaaacagacttgtagaggaacgaactcatacttgccttgttcttttgccagcaaaatactcaaattgctgttttagctcaatatacctttcagcactgagggtatatgcagcccctccatcccccaggaatgagtagaactgtgcaatcgtggacttattccctagacgtttctttctgcagttgtgtactcttttgccttggagccattacttcttttgtcattactgaggcttctttgcctggaaagcactggccagaattgggtgatctgtgagttcacgacttgagaacctccaacctctgattgcagttgcactggtggagaaggcacaatatagcccctgctgggtttgtcttcacagagagtaaatgagttcacaggctggccacaagaccacaggccatctctttgcctagcaggcaaggcaatagtagcccacgtgtttttgtgcctcattagtttccaggtgggccaggccaggatgggcagccaggttatctttgcatgaatacagactaaagtactgcactgtgctgctgtacgagaccaatttgaaggacaaaggctgcatgctacaatgagaacaatttcgctgtgtctctgaggctcatcatcaggaagctggctcccactcctttctggagctcagcaggtgttcttcacaggaccactggctacagccacttcagaggggtcagcattttaacgggctcttctaagtatctaaaaattccatttctaaggctctctgttggaggtaaagagtgttatcttctcagattggcttttttcagcttgttgttgagaatttggaaagaaagtcaacctactcccctacttgcctgctttgtttcctgctgcctaccagggctcttgtctaccattgtcagtagttttacctttcaacaggttgaacctcatgcagctgcagaatatcagatatagggtgctaggcatctgctttgggaatctgagttcctggcaaagtagtggtatggtgtagtaggaaaagcaatggaatgaaaatcatagcgttacagttttggaaatggcactccgtagtaccttgtatgacccctgtaaactctatgtgtctctatttcctcacattggtgtaatcatagtaaaatgacctcacagaacattgagaggatacaaataatgattaagaaggcatttggaaatccatgacacgtccagatgcatgtaaatacctgcttgcaaatggccctagaatccttctttatcaatgtctgacatgttttcattttcagtcctttcttgactaattctttgtctttttctgccaaattttgcctttggtctttggctttccaatgattgcatttggatcttaagtatccacactttggtttcctcctgtgttctctggcttgctgtgcctctgcctctcttaggttgttctgctaggaacttctgcttacattcttgcccagtgaagtgtaaacctcactatatccaggaactatatcaacatctaggctgaaccagttccaggcaacccctgaaaaagtagttcaaatgtatttctaaaagattatgcaatctcttaaaaatacaggttgaatccttctatccttctcagtaaaattatgcaatggttccccataacttatagaagttcaaattttttgcccttaaagcccagtttgggtttttaagacaccaagccattaggaatggcaggcctaattaaacagttgcatgcattttccccacacttcttagattgcatagtaataaaatataacactgagtattttaatctgctttggaatttctcagagaaatagagtgattattatataaattataagttgggtgtcttttagggggaaagaagtgaagaacagaattaagtaaatgcttattaatactaagtatatatcagtattgaattaatcagccatttgaaagatcagtacttcatatatcttatacaaactgatttaaaatcttgagttatacatatctagattgcatctagtgtttaatcaattggacacttacaaataatggataaatgatttgttgtcatacagagttgagctttgcttttcatgcagtgagaataatacttttcatttttacacttatgcagttgattgtaaactttgggatgatataatttaaatggatctaaacagtccattagctatgtcagtgcctcctctcttgccaagctatagttttatgctaagctgttgtgtactgtattacataatcccctgcattcattttctccacctatttagcttgaataaatacaaggtgactgcattgtctcttcaacctacttctcagtaaaaacaccaagtataaaaaacagatttttgggtgctattttgttttttctaatggaggattcaaaggattgaataaggttagaaatgcatgtttgtcactatttggttttgccccttttagttacccttactgtcaacttagtatggttttcaaggtgataagagagtggttgagtctcagctactggaaggaaattaagatagattggaggtcttagaagaaaaatcatgtcagttgtgcaagtggacaaaacaatgatttcttcaaggtcctcatttttttctccttctcctttctagcccttgatttgctcttttaaagactgggttattgggaggcagagcttgcagtgagtcgaggtcgtgccactgcactccagcctgggggacagagcgagactctgtctcaagaaaaaaagaaaaggactgggttatgcattgctagtgcctcttaccccataacatgtaggggaaaattattccatcacttgaaaatgatatacatttgcttatgtaggatacgattcagagagaagctttcagttgtctattgtttgttgaccaatggaggagatatcccaacatggtaatgctgatcttggtagcctcctctgactcagggaagaggtaaactgagaaaattcttcactggatgaaaagatggggaaggttgtgaatggttacagcaatttctgttaaatatttgcaaaggaaggcacttggccacataaaatcttcttcggtatagttgcatggagattagcataaatatgcatgtgatttgcataggccttttcttcctcacgttggttttagttcttatttatttatggtgatattctcttctctacactgatgccattttttcccctgtggcctcccacataaaagaagtgtttttgctttaaatacagatctaagggctgaaagggaaacatttcttttggtgaatgagtgattcatgtaaggtgagaggaattggtttctggctcaatttattcaaagtttgggatggtttgtcagtcaatgcacagttccatggaatcatctgtggcctttgacaagacaagtaggagcatctggaatatccagagtgatgggcaaagggaagataatgaatatttagactaagaaaagaccagacatgccccaagcccagagtaccacaaactaactgtgatgtctcaggcaactcacttatttctagtcatcaatttcttccttaataaaataagggcattaaatcaggccatctctaaaatcccttatagctctaaaatttattattttgacagactccttgctctaattatataaaaaatattaagcaccatgtagcacattaaataatatctggtgccttgctgttctgtcaaacttttcccctttgaagggtactggatgattaatttaagcttctctttataggcactactttccttgctcatttttctcagttcagtgggcacacaaggtataacttaaatgtttatagaagacacccattaatataccacttgcggtgccaaggacatgcacagtagttggctttgtggacatccatgtctgtagaaaaagagcttagttgtgataacgccatttgatttgtcaccttctactctagatcagggtcacctccaggtctcctgagcagggccttgtccaattgcattttaacaaagacgattcttcagaaatgaggggagagatcatgacaatagacagaacatttggggagtggatagaactacttcaaacacgcagacagtgttgaatttctgctttattatttttggggggctatttctgctaaaatccagtatgagttatgggctaactacttatacatgtgcaagctaccctgtgagcatttataggtgaacaggtctcttttgcttataccaatgtgtgtgcaagcagacatatgcaggtagatacatatgactgggctgctctggaacacacaagagaaacttgatctcttctttaactccctggagtatgaagctgaggctgatgttttaatgatgtcataatgctaagattaatttaacaatatgtagtgggtagaagtcttttcacattataaaatatctcctttttacagctcttactttatgatgaaaaaatattcattttgcctaagaaatttacctggggctgtaatggttaacacagatctgagttgaagtggacttggctttggttaattagcctggagtgtagttccggcagggaaaatataattctctcaaccttattttgtagcctccaatctttagagggaaactgtatacctcaactattgttgccattttcttttagtaatgaggtgcttttgatagcttttgaccaactctggtatgaagtagaccattctaagtaaggctatctggcaagaagacaaatggaaggtcataacactgtgtgtcaaaattatagatcgaatcaacaaataattaaataaaatatatttcaccctcttaccttgacaaatatacctttaaaactagttggaaagccaggctcaaatttagagtttttggattccttggagttctgcattgggaaatagcagcacaaggggaaccagccaacccctagtcctcaacccatggtctactcccttctcttcccacctttggctttgtcctatatcatgaagggtctggtatgaatgcatgtggttgccccagcctaatggagaagccttatccacatctctgcaaatagtctcccacggctactcctcagaccttgcaatatgtatggtttgcctttagaaagatggatcaagggctgggtgcagtggctcacgcctgtaatcctaacactttgggaggccaaggcaggcagatcacaaagtcaagagattgagaccatcctggccaacatggtgaaaccctgtctctactaaaaatacaaaagttagtcgggcgtgttgtcacacacctgtagtcccagctacttgggaggctgaggcaggagaatcgcttgaacccgggaggcggaggttgcagtgagccgagatcacaccactgcactccagcctggtgacagagcaagactcagaaaaaaaaaaaaaaaaaaggaaataaaaagaagaagaagaaaaaagaaagatggatccagggaagaggcctgcacaagccctgaaaaacaggcttaaggctttttgggtgggcaattacagggtcccagtctatgaaatattgtcttgaaagagtatatgggctccagtagaatgcgatcttggccccatggaactctagttctgtggggaaggatagttctgtggggaagaagagaatgccgtcctggccctgtggaactctagttctgtggccataggatagtccaaccagggtcttcaaaacaggataccctagagcagagagtcttgagtttaacagtggtattgctgtcttatcaaaacatatcaaattaattctcttcccctctccttacctgctgtatcacctgctcaggtccaacctcctacttaacaactcagccatgttccagggggcttaggactgtattatagaaaccaaagttagctgagttattgacagatgaaaatcccagccagatctttcggggtaatttatttttagttattggtcaataaaagctacctggagctagagagtcctttgtcagaacagttaattatccattctaaaccagctcttctacaagcatttaaaagcaattcctgaagcaaaagcaactcgagcctcacttgatcattttgcatgaaacctccctttaggtttttcttgagaaaattcgaaggaaaggcagcaatctcttttgcaccatcttgttttgtcttctaccctcgtgtggacacgtcgtttctctgcagtcacccctgctgctagtttccctggtgtttcgatataggacttgcagaagaattgaagggagtgctgtgttggtatcagcacaagaacggggcagtgcccctgcggtgtgttctctttggtatttgcataggtctgactcttgccagacaagtgctgattgctttcctcttttcttttcctatagctcgagaggagaatgtggccactttccgaggctcagagtatctgtgctacgacctgtctcagaacccgatccagagcagcagtgatgaaatcaccctctcctttaagacctggcagcgtaacggcctcatcctgcacacgggcaagtcggctgactatgtcaacctggctctgaaggatggtgcggtctccttggtcattaacctggggtccggggcctttgaggccattgtggagccagtgaatggaaaattcaacgacaacgcctggcatgatgtcaaagtgacacgcaacctccggcaggtaatggctgaggggagagaattcctggaaggctcatcttaggtggctgggtagtaaatttgtgaagcaggtgatgggtgtgaggtggagaggggtggagattcagggatggagatgttaacgtctaactttctcccagtctttgcaatttcacgtggaaaattattaaaatatgtttctccacatacttcaattctctctctgtgcttgttatttaagaaaaaaaaaaacaactcagttgtatagataataaaagttgtaagtactttcattccttttattctgctttcctttgatcattttcttaattacatttgaatcttatcgtattattgttaaattcaattagggactgcattttgtttctgcagcttcgtagattttcctcattctttgaatatatgtttttctttttaattaagttagccattgccacgatgccataattttaattccttccagaaaaagtcttccttttcctcttttaatttactaccctttcccaactatttttttcttttatgttaacctctagctttggaattaattagccgggatctttctgaattcctctgtttctctgttcttgatgcggtggtcctactctattgcccctgtctctccctccgagactcttcagttgactgggaggcctggaaagtggaaggacccaaataaaaaagtcaactttggagcagcctttcctggttctgtccgtgcttgggaactcccatcgcttgccgattctaagcaggcacctccgtcaggtgacaacattctcagaaagccttagccaagtgaagttgttttcaatttcatgactaataataatgataacaataataatacctcatcagctcacatcagtaaaagaaaaccgtttcctataaaaatcaaagtctgtgctgagaccgccttttccaggttgccattttcacttggtttttctatttgcgaatctgttgttaaacccagttggatggcatccaggctttattaaccagaaaacactatactttctgaagtgcttatcaaaaagtgcttaccaaattttcttctgccacatgattgatttaatgtcttctaatgtcaatgtgaaagcgtaagaaatgataggtgtctgcctacgttttctgtttgataaaagtgtaactccttacgaatactaaacaaatggtataggctggcacacatttgaaacacatttccacacttaggtatgtcaaggaagccatcctgttgggagattacatttatctcaggtaaaaatgccaaatgacacaagacttagagtccccaagcatcttgacattcatgaatctgatatttttgaatcattgttctatgtttttcctccaaggccaaagaaccctattgctaatatcttctttcgtcattcctcatccatacttacccaggagagaacgtctcaactgtcaagagaacccaaatcaaatatccatttgctaacacataagggcttgttacatgagagctgcagagactagacctaaaagtgaaatacaaccttttgctagttttgattggcaggtacaaaataacacgctttaggcattaatcagtggaggagagacttttcatgtacttcagagcacaatcaggtcatgattctcaccaatttgtttctctacctctctcccaccacccttccttaccattctggaatgattccaattctcctgtgaaaggctcacttttgtttctactaaaaacacttttctaaaatagtatcaggcacacttaagtcctttaaatggagagaggataaaccaaactgtaattcaaatattgtttgtgctgttttaatcagagcagctagaggaaaactaccctggatgtttttcccgcccctgcccttcatgttctaaggcccaactctgctctgtgcccttgggcaagccatttgacctttctccaccacagtctccatttgcaaaatggtggttacaatcttccgcagccatgtgtggtggctaaatatgcaaagcaccttatgttccagaaggattatgagctcatccatggtctaggtatagacgtgctgtgacgtgcacatgatctacaggctgagctttctgtttcaaaggtgactgcatctgtctggcaccaaggatgcagctaagtgcaattctctgttctagacagggatacagaggccctacagtattgggggtatttcttggcagagggagtattaatcttctgtgagaaagtgaacctaaaattgaacctcattgaaattctgactaaattttgcatccaaatgcaatttattgaaagaggaaaatctctgaaaagcaaagttgattttgcaaatgcaattattttaatgtgaataatataagattattattttgtccattaaaataatatttataacatctatttgagttccctgggatacatttgaatggtgggatcttcctgtctatttcaattaaactataaagagctccataaatatttgacaacaaacttatagcagccttattcatatttttggtaagattgaatggcttttatgacaaaaattcattgagtaaagtttacctggggtttcccggagtacttattaccaaatggagcagaagtctcctcatttcttccttcatgatcatctattcatggttttgcctttaagccaggtcaggaccaaggccaggtattttattgtggcttacaattaaaggaaggaatgtggactacctgtatctattgcaaactataactgggattagggaccaaggtagtgaggaatttgtgtgtttgtatgtggtagtggggtggtaattggtccttgacattgcctgagtccaaggtcatggccataactttcattgctttacctctatgtgttaacttttgttaaatcacaaacacaaaactgaggttaccagtcttccagtcttccagagggtttttctaatcatgtttaacctgccagtcttccctgctatccatacaataaattacataaaagcttgaaaagcattgttcaagaggaattgggggagagagattccaaagcattctggccaagtaaacaaattaatgaccttattgagtaataaagaagattctaattttttttgatacattctattaattctaaactgaaggaaaactgtttctctctggttgcacacatccacaaaaatgaaataggctgtagatgtttaattatctatggaaacctagagtacactacataaggcagactttctatgctaggtttgatctgtaaatgctttaagttttttcctttttgggaggatttcatgatcatttatccacattgtagtcatagtcagatgtgaaaaaagtaaaccccaaaatatttgtatttcagttctttgtatctgtttttctacatgtggaatggtacctgttggggggtctttccttttggaagaggtggaatgggtttgtgttagagggtgggaagggagtgggcggtgtccattcagaaagcccttaggaagtaagtatggtgctaattctaacgggtgaggtgtggtctgagagagatttggaagaagcagggagctgcaatggcatgtagactgcagctccttttctggctgtgccccaggtggcatggttttccatagagtcctggtctcattgtcttccccccactctctttttctgtgtcgggtgccttttttttgagaaactaacacaagatcattcatgcaatgtgtcattttactaaccgactaatgtactaacaccctaacgactcatctttgtttttagtttttttaattaacaatcgttctgttcacaatttttaatttcctttcttcccccttctccgcaaagcactcaggcatcggacacgctatggtaaacaaactacattgtctggtagatatcattcttattgtctctttttttgggtttgccgtgtgttgccccccttttcctctccaacccccccttttatcctctttagactcatttcttcttttaagattttgttacattaaatgcaagcctttctttttcttaaaaaaaaaatggaaggggatgcacttgtcctaaaaatgatatttggttgaattttgtggggaaggtttccttttctctagttttcaattttttcccccaaaaaatgctttttttttttttttttaaatctctatttggctaaatttgttttcttttgttttcttattttacaacttccaagttacatactagggacaacagagatttatagtgagaacttccttctttctgtgccttcctctccctctcactcttcctcttttctttttttctcctttcccactccttagtcccttttctctttcccttttatatggccacggctgccacaggtgatctggggaggaaagtactccacttcctagactctttcttacccttcttttactttactcccctaccgtggccaaaaggatatccaccaattatgttctccatacaaactctgcatggcatgttcctgtctcgtgaattttcctacctgcatcagaatttgtttcctcattttcctcctcattactaacaacctaccaatcatcaacccaatttcagtttcttctcttttatttttccccactcttcattctcctttcatctttcatatatttgggggttgggtttggactttttcttttcttttcttttcttttatttagtaagggaggtggcaggcagagaaaagactaccttttagttttgaatgcttttttttcacttccatcttgttcttcggtttgttcaatgcatgtaagtgtgaagtggattttgattctttccctaatttctccccaccctttcccagttttgtttttcttctgccttctctcttggttccagataatttctgcatgggtgtatcggtgtatggtgtgtgcatgctttgaggccccatcgtttctctctgccctctgctcctttcatggatgttgggtaaaagggtgctatttcttttctgtgggcattattatttttattgttttggttattattcctcatcattcattttattgttgttcttagagttgcctttttggtttgggtcatttcttctcttggaggtggtgatgggagccaagggagggtagggattggtgtcctggggcagtccatggcatgtatcatccatgaccatatcagaatcaagacccttctccttccctccctgaatgcatgtttgtcagcgtggtgtgagccaaaaaatattaataacaataaagataaaagaaaagaaaaaagaaaagaaaagaaaaaaggaaaaataaaaccatcaacaaccaaagaccaacccctaacaaatttcatcatcaaatgtcttctttgctgtttttcactaccaccatgaataacaatcatgtaagaaataaacaatcattttagcaatgaactgagacaagtgatatcgtctgaggatggttccattttctagcctgactgtgtaaagattgcaatgggtagaacaaggtgcccagcttggaaattctaacaaagtcatccatgagtctgcagggaaatactgaaggcttgagacccagggaggcagaccagaaaatggaacttggctgcacataccaaaatcaaatcaaattagaaagtatatctcatgaaaatcttaatgaaagtgatgccacaagtaggggaagccactgggttatgataggatcgtaaggtcattgttgggattttttttgtccctatgtccctccaccaggtgacaatctctgtggatggcattcttaccacgacgggctacactcaagaggactataccatgctgggctcggacgacttcttctatgtaggaggaagcccaagtaccgctgacttgcctggctcccctgtcagcaacaacttcatgggctgccttaaagaggtaaagttcacccaattctatttaatgcaccatgtgattgtttcatttataaacaaatgacatgtctaaatcaatgactggatctgtcctcaaatctatgagatgatagattgcagcagaaacaaccttgaacttggaagtaggtgtcctacgttttcattcccgcttaagctggttgcatgacttggggtttgtcactttagtactgtattagtctgtttgcatgctgctgataaagacatacccaagactgggtaatttataaagaaaagaggtttaattgatttacagttccacatatctggggaggtctcacaatcatggcagaaggcaaggaggagcaagtcacatcttacatggtggcagggaagaaaaacttgtgcagaggaactcctctttaataaaaccatcagatcttatgagacttattcactatcatgagaacagcatgggaaagacctgaccccatgatttaattacctcccactggcttcctcccactggctccctcccacgacatgtgggaattgtgggagctacaattcaagatgaaatttgggtggggacacagccaaaccatgtcaagtaccctgtagttctatttcctcatctaacaaatggaagctcttatcccacagatggctgtgtttataaattaaatgcagtcacacaggtgaaaggccattgaaatcacaaggaactagatgagtgcaaagtttgattttgtgattttgacctggcaaataggaaagctctagctaaaagtggctcaatctgttgttgtgtaccctgtctaaaatataacatatgtattattttaccttcactaagcctggtgttcccaagggtctcatagttgagacggaagaaaattcttataatgtgacattaaggctcagaagactggttttttcctttgcttcttcttcttccctgagagctagtagctgtgaaaaaacagtgggactttgccactacttgtttattaccattgtagctgatgtattgagacctctttctgagagcaaaggagcttcagccaagtgtaagttcaacctctaaggtcaattgttgaggcaaaaagaatcagactaaatttggtagagctctttcagaacactgtggcatcaaagcagtgcactgcacattttaagctaagcttcattgccgaagatatctataccatctccctggggatgttacttgagaagcaaacagtgttccttcttgtagataacaatcccttgtgacatcttatgagtctcctcttggggcatatgttttattcttactatggttatttgaaatttgttgaacatcatttgtatatgagatggcactgtccatgcattcattcatgccactgccctgtgagccttgtccaggcaggaattgtgtctgttaggcatggcacatagtagatgcataataaggatttgtttgtctatttatctgataatcattgagtaccttttttgtgctgtaactaaatttggtggctctttttaagccatgatctccatgctccaaggctttgccttgtaggaagggagatgagatcagtgagtgaataagtatagcataggagtacatgtgttcagtggcacatactaaatgctctaattgagtagaggaaacataaattttaggtggaagtcagttttagagaaggagtgacatttgaggcagtccttgttgtaataaatcatgtgcgaattgagaggaaggggtagaaaagagagacataataaaggagagaaaatccaattgtagctttgtattgttctcagcctgtaggacaaaataagaggagcacccaaagagtgctattatctctctgcaggatgttacctaggcttctgctggcttcagagatttcatcgtcatttctgatggaattatggtaggcatagagcccttcctcactgggatttactcctatttggatagaataaaggtatagactatgcactgtctagtgaaccctgaaagactcttaaacactgttaaatcacactacattggaattgcactctcatcagaaaaagactgcaacattcttgttaccaaggacatggctcaggaatgaatgaggcattggttgctgtggagtgctcattcagttttgtagtgcaacagtcctgagcatggagtctctccaggacaggatttaggtcttgcctttaggattaattttctcctacacacaattatattgagctacctctccattatatacttagagacaatggagcaatttcccaaccatgaatcttctatctattaatcaggaaggatgccctgaaaattttgaaacaagtctcataaaaacacaaaggtgtctctgatgactttatccatgtggaaacaaaagaaaataaaatacacacacacacacacacacacacacacacacatttttgctgcccagatagagagcagaaagcttcaaaagtctgtcagaatcattctgaatagcttaaaaggtaaaggcagttctgaaaaacagtgtcaataatagaaataactataatcagtgatgtcaatatatccttatcttagctagcagcacaaatatgcatttaaattcagaccaagttagaaaaaggaaagttcaaaacactaacggaaatgataggcaaagctagaacttgataaactcctgccccgtctgttttccctgtacagcgtgatagtctttctaagggactcggaagtcttcttatttgtctgagtactttgaacagatcactttgagtctaacgtagtgctggcatattatttctttgcatttaataattacacttcacttttctgtgggcaggtctatggagatacttctcttgttcttggtatttgtttttgataaatcagtaaacagcaaaggctatgttaggattcagctacctgataaaccccactcacccacttaaaccatagaacagtctttaattatttcacaatctcttcttccccttccttttcctcttgctgccttaaaaaaatcttctcttgccatttgtggctttaagttgtcctaaatgaaacaaggtgattttatgtgtaattttcttcaaattagggacatggcaaagggcctatgcaatttctgctccagatcatcaatatttctttgtgtgtggcacaaaataggttttgtctttgggactgtagttacttcacacctaaaagctaagttctggctccgtgattgtgccaaagggactggatattacttgtgtgcgtacttcctaacttcataccagtgtaaaagccacaacaaagcgtccacattgtcgtcaaactatgatggttctctacacaccttagttatcaatatgcagtttgtgtccacttaactatcatgaagtcagcatcttgttccttttcatgttttcacattttagtgtgtctgtctcatgtttgttcttgttgtatccccagctcctagaatggttcttggcacttagtggctctcagtcaatatttgctgagtgaaatcacatgattgtacattaataaatatctttcctaaatgaatgcttttaggtactattgaccacttgactttcctgggatgactaaagaacatcttgacatggcagtggttgaatctttcaagaatcttctctgcctccccctgagctatcagatatgagaaaaagattatattaaaagcctcagcaaggctaagaggaatgattggaagttcctctatgaaaaatgggttagaaaaggctatgagggagacatcatagtataatgaaaagaatactgggcttcagatcagaaaatctgcttaagaatgctagctttatcactggctatataataagaccactgatcttactccagtctcagttttctaacccataacaaggagataataaaacttctgttgcattcttaagaaaaaaatgaaatgatgtacataaaagtgaaatcatacagcattgcaaaatacaatgtttttgcttataataattattaaggattatatattgcattgtataaaatagtttacaaatagaaatgtaagtgtaagtgaatatccattaacacatggaatctctatatttctcatattagcaaatcattgtcaggaaaaaaaaccccatcattctgaggtttgccctacataaattctatcataatgcaaaaatagggataactcatcccacctgccctcaatgatgactttgttttttgcctttggtcatttatttgacactatgttttcctttattaaaatgtgaattccatgagaacagaggtcctatttgcttacaaatatttccccagcacctagagtggaccctgacattaaaaaaaatgcactcaataagtatgtctggaataaataaataaatgaatatgataacctcatggagctctgaaatctggtggagtttagatgagcaatgtgtaagtccagacagctattaaaaagtatcataggctgagtggcttataaacaacagaaatttatttgtcactgttctggaggctggaagtctaagaacagtgtgccagcctggtcaggttctggtgagggccctcttctgggttgcaaattgctgttttcttattgtgttctcacatggaaaaaagaggataagagttctctagggtcccttttataagggcaccaatcccactcatgagggaccttcatgacctgaccttcatgacctcccagaggccccacctcctaaaactgtcacattgtgggttagaatttccataaatgaactttggagaacacaaacattcagtgcatagcaaacaatatatcccccaaacctataatatgccaaggactgtgctaaaatacaaatatgagtcaaacatgtttcctgctttagaggaactcacattagtggggagaggcagacacacgcataaatgcaataaatagcagttaatgcacaacatgaggcattcttagttacaatgtggctgctgaggagaaggacctaatacatcctggggttcagggagcatcccaaggtgaggtgcttgaagccaagtagaagtgagcatggaagcatggggaaagaggtgctccaggatgaggggcagggtgagcaaaggcatggaggtagagcatgttctggtgtctgggtgaagaacttacaaacagcttgctaatttcaaggcccaaattataagactgggagctttggactggtagctgcggttaggtagggaccatttcatagaggcctttatttcatgctatacccttggactttgttctctaggtaacgggggagccattgaaggaccttatgcagcagaacatggtcagattggcatcttacccatcaggccttcattctttgaggagtaatgttaattcatctaccactttcccctgatgtatgtttttgtcctaggaagttgaagatcagggatagaaatggtggtccctcggccgagtgcggtggcttacgcctgtaatcccagaactttgggaggccaaggtgggcggatcacgaggtcgggagattgataccgtcctggctgacacggtgaaaccccatctctactaaaaatacaaaatcaaaattagctgggcgtggtggcgggcacctgtagtcccagctacttgagaggctgaggcaggagaacggtgtgaacccgggaggggcagcttgcagtgagccgagatcgcaccactgcactccagcctgggcgacagagtgagactccgtctcaaaaaaaaaaaaaaaaaaaaaaaaaaaaagaaaaggtggtcccctgagcttcggcattagattggcgcctgcctctctgaattttaacattactgcagacaactgcttccttctgactcccatttcagtttccaaaaaccctccctgagaggacatgcatttctcttttcctctgtccttggcattactgagctgttcaatgacaaatgaaatacaggaaggccaagccaagactgagttacatgagtagggtccccatcaggctactcaagcccatcacagtttcctcccacgtgttggaccttctgtgtagtttgatttggttatttccacaccatcctcttttctcctcaatctgacactcctccattttcccaagtggagaagcgaaagtgccactgagacctctgggacagactggactctctcatctctcttttctcatggcatctctaatggggaggaaggaaaagcaggagaattgggagaatagaacacatatttaaaggaaaaaggattggatagaacatcattgtgcacattacattccacatccctttgtgattattagccatttaaaaccgaatggagttttgcagccagagatagtctctgaacagatgattaatggcttaatctgtaataactttacattttatagaaccctgataggcgtccacatctggtgagccaagctatttaaggctgtgttaattctgttaattgctatacgtttatttgaattgctggcacctgcgggctttgggataatgtgtttgttgttgctttttttcttctttaaaaaaaatactcattttattttaccctgtcttgcttgctgtctcttgttgctatctctcatgctatcacttaatttcttctctggattttcttttgggttgtcctctttcttccttactcattttcctccctcttccccatctccgttccgtttttctctaattcgtttgtttcccaagctgttgttttggtagccttcctgatttctcaggtggtgataatgtctctgtccataagcaggtgaatttaggtcatagctttgggcctaaatattcctttttcctgtcatgaagactactgtgcagcgtagggctagtaaaacccaagtgaggcttttagaatcaacatgagacatgagaagagggtgggcttcagcagcacaagcccagggtttgagtcttgcctagactcattccttgctagttgcatggcttttagcaagccgcatgactgttctgagcctcggtttcttcatctataaagacagagactaatactgatttcatgtatttttatgtagggagcaaatgggattagacaaatggaggtgttttataaaatacaaaacactatacaaaggttaatgaagttgttatttatgttattaattgaaacaaaatcaattagttcaggccaaagaaccacttactgctcttcaccatttctgcaattaaaaacctgcagaagttaggagagtccaatgtagtttaattaaaaaggcctgatactgggttcagttctaatgttaattagaaaattatacaacttctctggatatccttgtcttgatctgtaaaatgaggatagtaatccctgctaatccaaatgcacactactgtagagaccttcttgtaaatgtagcatagaacacacattattgctttgggtagcaaggtaaacatcttgctgtacatctttattccattaaggaagatgtacggaaaagcactctgtgggtttggagataagagcgtcttgacagaatgggagaaccaacacaaaaggtgaccagaagaaataagagttgagcaaggtggaaagaagtgaagatgcaaatcagaggaaatggaggaacgtggcagaagaagaaaacaaaaagcaattacggcatctcaggagctaactattggcttgtcatgggctgagtgatgtcctctgcaaattcatatgttgaagttctaacctttagtttgtgactgtttttgaagatagggctttttaagaagtaattgagatcaaatgaggtcatatggataggccctcaaacaatatgattggtgtcgttataagaaggagtgataaggacatggatatacaaaggaaagaccatgtgaagacagagggagaagatagccatctacaagctaagaacagaggcttcagaagaaaccaaccttgctgaaaccttgaacttggacttctagcctcctggagtgtgagaaaataagtttcggtaaagtcaaccagtctgtggtattttgttatggcagctctagtaaattatagagcttttttatgggttgaccataaaaaaaagatggccatttttggctgggcatggtagttcacgcccataattttagcactttaggaggctgaggtgggaggattgcttgagtccaggagttggagaccagcctggtaaacttaaggagactgtgtgtgtacaaaaaacataaaaaaatttagctgggcatggtggcacacgcctgtggtcccaggtattttggagggaggtgggaggatcacttggacccgggaggttgaggctgcagtgagccaagatggtgccactgcactctagtctgggcaacagagcgagactctgtctcagaaaacaaaactgccattttttgtgtgtgaggacaaaaaaaaaaaaaaaaaagtcaaatattggcaatgtcgggtgattcaatttcagaaagaaatgtttgtaaagaggataaattgaatcttctggaaaagagatgactttctggattacaaggaattgaagtgggcaggaaagagagagagaaagaaagagagaaattggcaatgtcagtcgattagagattcccattcccctggctgtggttgttttctttataggtggactcctaatgcagtttggacccataacatacagaggcacagaggaagaaggagcgaaaccctcagctactggggacagggatacatttgaggcttatttcagtaggaaccaggtgtgaacatttagccaagcgtggctgtaaaaaagtggtatgggcctaaggaagagtgaggagcactgaggtctcaaagatctttggtgtttcggtgctgtgacagacagagagtagttcttcagttagtgccacaataaaattactaaagaaggatttgctgcttacagttgatgggttgttgatgaagaagtagatttatatatatatatatatatatatttggcaactgggtattcattctgccttcatctgatacatgtttcttgatttttattcccctcattctcaatccaatgattcagtggcacctgctccactcccagctccgttagtgagcatgtgatccctaaatcaattagagactcctaattagagactcctattcacctggtcatggtttctttcttcataggtgagctcctaaaccaatttggatccataacatacaggctcagaagttttgtctatatgttgtagggaaacagctctctcctgctttgggctagaacttggagtggtgttaaactaagcttctggccactatcttgccaccatagtgaccaaaaaggaagccaggatagagaaaatcagagccaaaagatgggaagaaactaggccttagtgacatttttgaaggccctggtttaaacagttttcaaattagactaccccttaatttccacttatggttgaataatgtacctctgttgcctaaacctgttgtggctctattttctatcatttgcagcaggaagccctaggtgatgtagcagaattcctcatgttcctattttactcctgttttttgctaacaaaaagataggtccttggacagggaaagacagacaaaagtaggaaatgtaatactggaggatcttagaaatcagataatttgctctgtattaattcaaatttcctgcctcagatgaatgctatcccaggatacagagagaatttgtaaatacaatttttgaaacctagttggtggtttttgaggaacgctagtgaataaagaaggttcctaaagactagacaattgaaaaatgtagataatgcaaacaatgaacttatgagttgaactgaaatctggataacattttggagtgcaatattaacagaatgtatgagcccatagcagagaaaagagtgatcaatataactgccatcactaattaagagcactaagaaaaagctatatcatatcaaccaaattcacatactcattcagtagtattaccgatgattcagaaaagtactatggacctcatctagctaaatagcagcaaagtttttgaagacacattttgtgatattctcattaataagatgagcaatagggtttagatgcaagagctatcaagctattaaaataccaatgggccctgattaagtggatttttttggcctatatgaaagtttttgtaagatggcacaaagctctgtcttatattaaggacttgaagagacataagagaacatggcttgttaactttgtggatggcagggacagaaaatggtagaaattgtgcatctgtgttatctgaggttgaattaatagaggtctgacctgtgcaacaaaggaggtaacagttctgcagtataatttattggttaagaaagcaggctctggagttagagtttctggctgcaaagcctaactctactcccagtagctgtatgatgctggataacatacctaaccttctgttacttattaaatgggaacaataattatacctacttgatagggctgttgtattgagatcatgcatgtaaaatagctgacatgtagaaaatgttcagcaaatgttatttattttttttctgagacagtttttttttttttttctgagacagtgtcttgctctgtcgtccaggctggagtgcagtggtgcaatctcggctcactgcaccctccaccaattctcatgcctcagtctccgaagtagctgggattacaggcatgtgccaccacacccagctaatttttgtatttttagtagagaaggggtttcaccatgttggccaggctcatctcaaactccttcaagcgatccatccacctcggcctcccaaagtgctgggattacaggcataagccactgcgccaggcccagaataagcttttaacatgacaactaattgacagattagaatatctttagagctgagctgtaaaaaaaaaaatacccaaaaaactaaggcattcaagatcctaacaacgttaagaaggcttaactaatagaaccagggtcatttaacctgagaaagtgaagatgcctgtgcccaaggtttgagagtcgtcttcatacatgaaggactgtcctatggaagtggaagaaaatgtggcccatatatccttaagaagagaaactaagtctagtgagtggaagctgggtacttaacataaggaagaactttcagtaagagctgtccaaaactgccttcaaagtaatgagttctccaacactcaaggcatccaagtagagactgggcaaccattttgctgaggttatcgaggggattctggaatcatatgagtggttttgattttatagatagatctatagatagattgattttatatgatagatctatagttctacgatgaatgacctatctgcaaagaaagaataaggctaactgattagctcaggttcatcatgtggaagactttcctcattaatctccaaatcagttggctttacatgtcccacaaacatttattgggttgcccttgtggtaagagttgaggttcccagccactatcatcacctattactcacttacaagaatttatctttactcagtcctttacttgatcatctcgaaaaccgttacaaccacagcaattataatcatagcagcaacaataaagactagcaattattgaacacttaatgtgaacacatgtgaaatgtgtgtctacatggtgctatgtacttcagacttattccctacttatttcctaatttagttctcacaaaaaagcttatgagctggattctatgatcattactaacttgaatttaaagagagcgagtgtctttcccacttacatcattctaagtgttggagttgagatgtaaatactgtcaacatcctgattttgctgccctttctaccaattcagtcataagagttagtgacgaagaaaaggaagctcctctggaaaaggttggtgattctgtgtttaaacttactgtaaggaattgtctctcactaccgcttagagtctctacttcataggaaaggtcatttaatcaggcaaaaatgttctgttgggagactagatacaattacctatttctttcaccttgccattgattgttctgagaggaaggcagtttttgcttgatttcccactttgggcaaattgatattgctcaacctgctaacggaggaatgattttcattatggtacctgagagggaagatgctgctcttagtataaatgccaagcagtgcaatagtttcgtcttgagatgggcagcacattgtttctttttgttccagcctaatattttccatgaagttggagctatttgcctttaatgccttcaaaacacccaaataaggagcagctactatttagacttattatgaattttcagtctgattttgggaatcacttacttagctttgcatttttttttcttttttgctcgtcaagataaattcagtggaactcattgctttctaaaaatgtcacttatttacagcaaatgtaatctaccacaacattcctactgagacaaaatctcttgtgtctttgaaagcctcaaaggagattaaaaaaacactagtccttgtacacatatacctacagggataaagcaatcattgagctaattaattagcttatgttttcaaaaattgttttgcaaatgcagaaacgactattccattagtgttgcggtgcttttgtaaccttgtgttctgttcctcatgtggagagtgtgccacaaatagttcctgcatagatttcaagagagatacaaggacacatttttcacttctcaaatcagtgaagatgcagcttagggcagcaacactgcacaccaattatcaaccaataaaattctcctccttccctctcccttagcttttccctcaccacccaatatcagcagatgttctatctcatactttgtagggaaaatagaaattgttcaggtaatgcttgctaagcttctctctctccaccttaagacttaccttcaaagattctcattgctaccttcttcccctcatcttacagaatgaactttcccctcctctcttgcctcttttgagatttagcccctttaaagattccctctcttaatcttcgatctcccattctcctctgctccatcccttcagctagagacatactcaaaatcacttctttgatactgtctcctgctcaatttacacctaagctcattccccactttcaatgaaaaagttcttgggagaatggtacatatttctgatgtcccctacttcatggttactctttaaccctctacatttgcatgtcagactctgaactctaggatccttagcactttagtggaattgttttcttgttttaccctgcttaagttagaagtactttattatatgctcctatagctctcagttcaaaacttcaatgcattgcaattgttattatagtcctcatcacattgcactttaacatgcactgtgttcatatgtttcctcaatagactgagcttctaagagacaagaacaaagatttatgtagattgcatattccctctgaagttaaacataggtcctgacacatgaatagatgggaaatattcttcaataaattaataagtatttgtgaacatcagtgatagaattattgttccaaagttccaatttctgcttatattcattttgtcaacagcatgccactcatttacttattcatgaatgcagtaaatattcatggaatgcctactctgtcataaaatctgttcaaagagtgggagtgtgtggtgaatgacagcatgtataaagtctatgaccctatggaattcacattacggttgaaggagactaagaataaatgcaaaacagataattcagatactttcagataatgataagtggcatgaaggaaatgaaagagaataatgggtgtattagtccattctcacactgctaataaagatatacctgagactgggtaatttataaaggaaacaggtttcattgactcacaattcagcatggctgaggaggcctcaggaaacttaccatcgtggtggaaggggaagcaaacatgtccttcttaacatggcagcagcaaggagaagtgccaagcaaaggagggaaaaagccccttataaaaccatcagatcttgtgagaacttacttagtatcatgagaacagcataagggtaaccaccgtcatgattcaattacctcccaccgggttcctctcatgacacgtggggattatgggaactacaattcaaggtgagacttgggtggggacacagccaaactgaatcaatgagatagtgagttggtctccaggagcctgagtggtcagggcaggactctttgaggatgcaataattgagacctgagatgaaagtagcactcagttacacacacaaaaccttggggagaggccattccaatccaaggaagctactaggacaaaaaggacctaaagcaaggaaagcttggcacattcaagaaaagtccaggaggcgatggtggccatggctcagtgagagaggtggtgagaggaaagaaatatctagggctggatatgttgcttttctgaaaagatccaggctaggcaatgtcaatttatcaagcttatctctgcctcagagtcttcattttccttttatcccatatctaggttgattttctctttttctttatcctcgaaagtgaggtgtccctctatctttgtaagctcacatgttactgtgctcagtcagcatctccttctctccctttcaacttccgaattactcagttattctcattctttcttgcagtatatatctatatattttttcttttaaaaattgtggtaaaaaaacacatatcccaaaatctactcccttaacacaattttaagggcatgctacagtatttttgactatattcacacggttgtacacagatctctagaacttttctcttgcacctttgatatttgcctatttgtttcttcttctcagagttaaaaacaagtgttagtctatcctttcataaaacccctctcttgacctgcactttattaagctcaggaagataaaaaatgcctctttccaggagacggtagggaaaaagccaaaacaaaatggttataaggtttgaaaaaggaaagataagaaaagcagcattggatgacccataacttctagaagccagggtgggtgcagtgtgctaaatgtgagaagaatggggcgtggttatgtagaattcaataggtttagaacagctcatactgtcattacctattcactcgagttagaaacctcaaagtgagatgtgatctttctttctcattccccttcttcctttttgccctcatttaatcaaacacaaaattcccttggcaatgccctgtatatttctgactcatctctgtcctctgcttcctggtcctttcactactgcctctccctctgcccccatagtacttcgcctatcatggtgtcatgatgagtctttccacctctgttctctctgctttctttccatgctgcattctgccccgttttgctctttgtgccattctttggaaacatccagtgcccagcaaagcatgtcttcttcagcctcccactcaaggccttctgcagtttgtcttcaacttgggtgccacctcctcatagttcctccctaaatttaaccagagtagtcttttcctattactctaaatgtatgttttaagttctttcttctataacttgtttatttggttcttctagccaagaatttctccctttctcttttctgtctgatgcttaccctttcttctagaacctagctcatggtcacctgcttgactgatcactgggttaacagtggtcttttctcacttctgaattccaagcacacttaatataatatagggtgtttcagctcagatttaggaggtagacttccaggttgaaatttttgtttttctacttactacctatgtgccttggacaagttagttagtgtctctgaaactcagtttatttatctataaaactggtatcttaatagcacttacctcagagatttcttatgaggatcaaatgagatgatgcaataaagcctttagctgaatctgtttcgtagtgagtactcaagaaatactagctattttgtcattcagttggtccttacaataccccatagccatttgttagcttttctggcttgcatacaatccctttgaaaacagagtttttgtagttacagcaatgctgtatataatatcaaattattaaagacagtggaaaagaatttatatcccccaaatgaatgtcttgactgactgtaagaaagttgctgtttctccttattacattttgaccacaattgaaatgtggtcaaaggagaccatctgccaaaggagaataattacttcttcacagacataggaaaaaaaactcactcatggataaatatgtgtgcatatgtgaaatatgaatgcagtgatttcacatttttaaaattcctggcaatcaaatgagattgtgatagattatcttttttttttctgagatgaagttttgctcttgttgcccaggctggagagcaatggtgtgatatcagctcactgcaacctctgcctcccaggttcaggtgattctcctgcctctgcctcccgagtagctgggattacaagcgcccgccaccacgcccagctaatttttttgtatatttggtagagacgggatttcaccctgttgaccaggcaggtcttgaacttctgacctcaggtgatgcacccacctcggtctcccaaagtgttgggattacaggcgtgagccaccgcgcctgaccaaattatctttcttagagtaacttttcttcatagatattaatgtaacagttcttatggatgatgtttaaaatgcttaaggaagcaaaacttagctgtaaaattgggtattgcttgatgatcaccagtgtcccattgaggtctaaaatgcttatgaagtttaaattgctttgcagtgtgttatgatctttcaattatctttaaatgattgatttaatgagcttctattattatattttaggtatggtgtttggaatgcaaagtgaactggacagtttctttcctggaagatcttatagttcaggggttgacagcattttctataaagggccaggttagtggcttctcaagtggagacaagtttgaccccaagaaatatttgacaatatctggagactcttttagttgttgaaactagggtggaggagtggttggaggggagtaaagggatattgaagggaagatgctgctggtgtgggcagaggccaagattgttggtgcactgtaggcctacaatgcacaggacagcccttcggtgacaaggaattatccagtcctgggtctcaacagtgccgaagctgagactctctggaccagacagtaagtagttttggtttaatgagccatatggtctctatcacgactatcaaactgtcattgagcatgcgagcagtcatagatactgtataaacaaataagtgtgtctgtgttctagtaaaactttatttagaagagcaggaagtgaattgaattggccccagagggttagtttgctgactcttgctatagttaaatggcaggcaaaacttgataattataatgcaacatattaaactctatctatctatctgtctgtctgtctgtctgtctgtctgtctatctatctacctacctacctagatctatctgtctacctagatagatagatcagtcaaagttttcacaggtttacaatgaagccccagataagagcacttagcctgatctgagatattagagatggtctcctgaaagagaaagaacatgaacaaaagttaaaaaaaaattttaagagtgaggagttagacaaaaacagtaattccatagagagagaatagcgtcagtaaagtcacaaaaatgcaaaatagcatgataagcatagagaactaataataagctaaaggaagtagaagtggcggtaatggtagtagtagtagtagtagtaatagtattgttcccggaaagggatcctgatccagaccccaatagagagttcttggaccaagaaaaaattcagggtgagtccataaagtgaaagcaaatttttaagagagtaaaggaatgggaataaaagaatggctactccgtaggcagagcagccctgacggctgctggttggctattttatggttgtttcttgatgatatgctaaacaagaggtatatatttattaaatacctgctaaagaccaggctctgtgctaccgtgctacacaggtagtttgattattacaggtctgaggcctgtttgtccggatgattttagttcacacccatagtgacacacgggtctcttcttgcttcattgctttttccctttttctgggaaagggaagaaagggagggcgattcctggaactgaggattcctctcctttttagaccatatagggtgtcttttaacatgctaataactataattagtgtataatgagcagtgaggatgaccagaggtcacttttgtcaccatcttggttttggtgggttttggctggcgggatttttttaaattttatgtatttatttattttttattatactgtaagttctggtttacatgtgcagaacgtacagttttgttacttgggtatacgcatatcctggtggtttgctgcacccatcaacccgtcacctacattaggtatttctcctaatgttatccctcccctagccccccaccccctgacaggccccagtgtgtgatgttcctctccctgtgtccatgtgttctcattgttcaactccctcttatgagtgagaacatgcggtgtctggttttctgattttgtgatagtttggtgagaatgatggtttccagcttcagccatgtccctgcaaaggacatgaactcatccttttttatggccgcatagtattccatggtgtatatgtgccataatttcttaatccagtctatcactgatggacatctgcgttggttccaagtccttgctattgtgaatagtgccgcaataaacatacgtgtgcatgtgtctttatcgtagaatgatttatagtcctttgggtatattggccggcttctttaccacattctgttttatcagcaaggtctttgtgacctgtatcttgtgccaacctcctttctcatcctgtgacttagaatgcctaacctgggaatgcagcccagtaggtctcagccttgttttacccagcccctattcaatatggagtttctgtagttcaaatgcctctgacagcaatagcagttaacttttattgagtgtttaccatgtgtcaggaactctaagtattttacgtgtgctaacacatttcataaacatagagctcagtgttgctggagtaatgtaaaataaggtttaagatgtgtgcatgcaccagggctagggccttatttttaggtggatataactgggtatgagaagaccaacaaggaggtaatgagtaagatttattaactgattggatgttccaggtaagggcaggaagaagccagaagtttctggtttggcaacattaattgaatgtaggtatgctggaggagaggcaggcctaatggggaaagtgctgtttttgatgggttgagtgggaagtacctgtgttaactgcagaacaaggtcaagtcaaatagctggagttgtaactgtaattagaatataagcaatagagttaaattaattgaaattgatgagatcagttaagaaaccacatcaaaaggaagaacaatgtattttaaagaagacttctaagagtaactaatatttaaaagaaggcttaaaagggaaaattagtgaggtaggagaagaactagagaaaacgttgtcatcgaagctaagaaagtaggaagtttccaggtatatggcatagtcagcagaggtcagtgccaaagagaggaccaatacgttgagaactgaaagtgccctcatagctgagaatttagacattgtaggtaatcattttgttttgcttttgaatgacagtgataatcattttcaaattcagagagaaaaaaaggcagtggaagtggaaaagctaaagatataagaaaactaaatgttgaaacaatatcccagtgaataatttcaaacttttaaaaatgtatttattaaataaagtacatataagaaatgttgctattgggtactatgctcagtatctgggtgatgggatcaattgtaccccaaacatcagcatcacacaatatatcaacctgcacatggaccctctgaaactaaaagttaaaagtataaaaataagtaaataaagtcaaacatgtgaaaaaaagaaatatttcataggctttttttcagttgctctaaatttttaaaaatacgtttatgcattttcctataatttgtgttttgcatttatattctccttttctctaattgattagctctatcattagatttaactgatacttagagtttgattggctcaccatctatttatcataatacattgaaaagtcacagttgaaaactataaaacctcaaggatgtatttatgtgtttagcaaatggaacacaaacctcatagatttgtaactttgagacaccaaagaatattgggagacacttatcaattcagttgagttcaattcagtttaaggcatttgttgaatgctatgcatttttaacagtgatatgacaggatttttctttcctttcaaagcagcttgccatcttatctgtctgtatgtttattgcataaagaatttacagcagataaagatgtagttggtgcaaaaaatatacagaacttgaaagatctaatcataaagaaatataacaaaatgctatatcatatagcagagtcagtgatacaaagcaatttgtactaaagactttgggagggagagaccaacatgaactagaatattgtgagcatctccatctaatgtttctgcctaaatgctgttcttctctagacagaactcaaccaaattactcttaacagaagaacaaatgcaagtgatgaagaaccaagggacaagcaaaggcatcaatatattgtttgctatttgaggaccaactgtatttatttatctttgtatctccagggccaggcactatggctaccatgtattaagtacatgcagtcagtgctgaattgattacttctggtcattagattagcacagctgagctgaggtagcttggaccatgtgctatgtggatgcttccctattaatgatgctaatgacaaagagaatcaggtccaagagacagtgagttgggagtacgccacctatagaggactaggagagaaaatatttttgaaagagaagactaaatgctagatgcactattaatgggaattggtcacgcccacaggactcttccctctagcataacataccgatatataaaaacatgcttgctgtgtgaccgaatgagccaatcctggcttaacatagacaaacaaaaaagaagttgccaatgccttcttcagttcagtatctcatgaaagaaatgcaaggtgaagagaaagcttaaatgaaaaaaataaagtgaaatctgtaagcctggttctcatttctaagggtttattatactggagatttcatgaaaatagtattgagaatgactactctgtgatttttgctagcttttagtccctataggcagaaaagcatttctaaaagagatttgaaaattgtggactctgataacactgctagttgtcatgtttttctctaatgaacagcttatcagtaaatgtgctcagtggttaattaccacattagagtttattggcatcaaatgtagtagaatgccgattatccttatgcaaatttggatttactgcaggttaaatcctgtgacctgaaatctaagtcacctgtcataaattaataggtccaggtactaggcctgctgggattggcagtgacaaaagaccccatgagttgggggaatgaatcaaacctgcatgggcaagattcattctttggaatgtctcacaaagcctggtgcagccaattgtgctgcagaggctgtgtggtgtttttgtgttgttttgattttgtttcattttacagggcagccaggcagtccaagcaatggttcaagccactattgatgccagcggtgtcatccatgaggtggcactggcacttggaggttataggagtcaggtggagctatatatggttccaaaacacatgtcaagtttggggtgtgggtacgaaaataaagacagattcccagatgtctccgtcagttcaggctgccctaacagaataccatagactgggtggcttaaacaacaaacatttatttctcatggttctggaggctggaaagccgaagatcaaggcctgcttcttggtctgcagatggccttctttttgtatcctcacatggtggaaagcagagatcatctctcttgtttctcttctcctaagggcgctaatcccactcatgagggctcctactcatgatctaattagaaccaaaggtcccacctccaaataccatcatgttggagatcagggcttccgtatatgaatttggggaaaatgtgaacattcagtccatggcaccttccgtaggaagtcttgtcatggcccaatctaagcaaactaaagttcacagttatctcaggttttttgaggggagtggaacgtaagacagcatatccaagaccatcatccaaaaacctatgcctatagtgggcccatgtgacagagcagatatggctgccacccagtggccacatggcagcccatagctcatgagtgctctctgggtttgcagaccgaactgcctatcagaaactgggacagaagcagctattatgcctcctgtccctgtcaggactgggtcaggaatgagggcattagggcttttgtgtgtctctcagattaaactctgctcacttgaggttaaaacaaggcagaagctggcctgagataatcaaagcctctttcaaatctatttgcttataaaggcaaggtgtttttggtgtctacaaacttctaacacatttgtaggcactgattattctgcaaataatgggggacctttctgaagccctggatccctggccaatgcaccctactccaagcacattgaaatttttaacaaaatttttaataaaattgagagatccttggcatctcaagaacaggaaaatcattacttcttcaaatgaatcattggtgctcataagggaaaagtctttcatgcctagggcatgtatccagataattttggtggggaataacatttcttaccacattgtgagtgtttatgtggctggggcaaaagaagttgtggtttcggtgctgatccattagcagtgagtgtggtaggtgaaagttccttaattgttccccagagtaaaaacatcccagtatttatagactattaggggagagggggttggagaggcaggtgacttttcagccctacactgatgacttttatgtcttccaggtcacattaaaatgttttgcttgaattagaataaaagtagtcctttttgtccactctaaattcagtgtcttggttgaaagtatccacagaaaacattcctcagtcttcataatttcccatttacaatagagaagcaaggctctctgtacttaagaatagtacaagctattttagatgtcagatgtagtctaagaatgattgagtcaacaaaggagcatgaagacagtgatgagttctccacacagcaggtgctcagtgtagggtgataaagaactagaatggcagctaagtaggtggcaccagactctgaagaagcacttagtcattgtctagaatgtgccagaccaagtgcagttttaaagctctctctggtctccttgtcctgtgaacagacataaggcctaaataagaggcagaattgggaggctttttctttgcacctcaccttccttaccacctggccttctaggcattggagacagaagagaatctcccacatgcaaatcagcccccaggtcatcttatagcaacaaaagcctgggcaagaattaataaagaaatgagtggaatctaaaagtctctaaacataaagaaatacctgtaagatgtctcttctgagagcccattatatagaaaggagtcaaaggaagaagagaagccaagtgcatggatccaggagagtaactggtccagtgcatttctgtttaccatacctttattcctctaaattttttcagcagttctggagtagctccattagatccttgatgagttaattttgccctagatcaatttcaaagcttaaggatacagtgagaagagaaggtttgaaataccttagggaaattacaggatcaaataaattttattattatgccagctcagacagattggtagtgttgggaaagattctagtgtcacaggaaacaactatcctgaagtttctatggcgtcttctgggccatattttaaaatttgactattcaggcatacctcattttattgctctttaccttcttgcacttttgagttattgaattttcttttttcaaatggaagttttgccgccaccttgcatcaagcattttccaacagcgtgtgctgacttcatgtctctgtgttgcattttggtaattcttgaaacttattattatatttgtcaatggtaatctatgattagttatcttcgatgttactattgtaattgttttggggtgccatcacccatgcccatgtagaatgttcatagataaatgttgcatgggttctgactgttccaccaaccagctgttcctccagccttctccctcccttcaggtttccctattctctttgatacaataatattgacattaggccaattaatagccctactgtggcctccaagtgctcaagtagaaagaaagagttgcacatttctcgctttaaatcaaaagctaaaaattaataagtttagtgagaaaggcatatctaaagttaagataggctgaaagctaggccttttaggcctagctgtaaaggcctaaaagttagccaagctgtaaaggcaaaagaaaagttcttgaaggaaattaaaagtgggcacatgaatgataagaaagtaaaacagatattgctgatatgcagaaagttttactgctctaggtggaagatcaaaccagccacacatttccttaatccagagcctaatccagagcaatgccctaatgcttgagttttatgaaggctgagagaggtgaggaagctgcagaagaaaggtttgaaattagtaaaggttagttcaaaaaagccatctccataacataatagtgcaaattgaagcagcaagtgctgatatagaacctgcagcaagttatccagaagatctaggtaagatcattgatgaagatggctacactaaccaacatattttcaatgtagataaaaagccttctattggataagaaaccatctaggactttcatagctggagagggaaagtcagtgcctggctttagaggacaggctaaactctcttttttgaatctaatatagctggtgactttaagttgaaaccaatgctcatttgccattctgaaaatcctagggccctaagaattatgctgaatctactctgcctgtactctgtaagttgaacaacaaagtctggatgagagcccatctgtttacagcatggtttactgaatatttcaagccaatttttgagacctactactcagaaaacaaagtattttatgtaaaaatattactgttcatcgacaatgcacttagttaccaaagagctttgataaaaatgttcactaagattaatatttttatgcctgctaacacaacatcattctgcagctcaaggagtaatttagacttttaagccttattatttaagaaatacagtttgtaaggctatagcttccatagatagtgatttctctgatggatcacaaagccttttagaaaggattcaccattctagatgccattatgaacatttgtgattaatgaggaaaggtcaaaatatcaacattaacaggaatttggaagaagttgattccagctctcatggatgactttgaggtttggaagaagttgatcacaaccctcatggatgactttgaggagttcaagacttcagtggaggaagtaactgcagatgtggtgaaaataggaaaaaaaaaaaccctggaaggagagcttaggatatgactaaattgatgcaatctcatgataaaacttgtatggatgaggagttgcttcttatggatttgcaataaaagagcagtttcttgagatggaatccactcttggtaaagatgctgtggacaatgttgaaacgacaacaaaggacttagaatattacataacttaattggtaaaggaatgataaggtttgagaagattgactccaattttgtaagaagttcagctgaaggtaaaatgctgtcaaacagcattacatgctacaaagaaatcttttgtgaaaggaagagtcaatcaatgtggcaaacttcgttgttgttttattttaggaaattgcacagccaccccaacattcagtaaccactagcctgatcagtggttatcaaaactgaggcagaccctacaccagcaaaaagattacatctcactgaaggctgtcaacttagatgactgttagcattttttttaacaataaagtgattttaattaaggtttgtacattgtgtttttagacataatgctattacacacttaataggctacagtatagtgtaaacataatttttgtatgcaccaggaaatgaaaaaacatttgtgtaactcactttattgtgatagtctctttattgcagtggtctgtcactgaacccacaatattaatatttttgagatatatctgtatgtgtttatgtccttaagcaatatatattacactttgagtgttcaaaatttatataaatggtatcatactgtgcatatctgtacagcttactttttaaacataatgttttgtctatgttgataagatttatctatgttgatttcattcattcatattaactgttacttcatgctccatacttttttttttttttgtagagacagggtttcactgtgttgcccaggctagtcttgaactcccgggctcaagcaattgactcagcttccctaagtgattggagctaaaattatctcccaccacacccagctactccagtatattttcatccacagttgtgccagagtttatctagtacatatacctagaagtgcagtttcctgctaggtcataagctggatgtttataactttactaggtattgccaaattgctttccaaagtgatgtacaaattcacactcccaccagcagaatataaatattccagtttccttgcatccttgacagtttttggtattgccaataaatcaaataatgtagtataaaccaactcaatatagtgtaagccagatttaccctgtaaaacatatgcctaaagttcccattttaaggtccttgtttctactgagaatccagaggcctcaaaggtgcatatattgcacattacctccctcatttcctattctactaagccccagtgagtggccttccctgcaggtgtcagcttggagctggtctcttctttattagcaccaagttgctgtcttttaaatttagaactgttgtagttcttctagtcctgcagaatttcattactctggcctcaattgctcacatgtaccatctttcaaaaatgtcaggatagatgagaagatcacagggccatactctccttcagacgataaagcaaaacacaaccaaaccctcaaagcagatatgattactgcagcaacaggaaataaaggcacaaaaattgttataaatgattgttttcatagaaaaaaagtattaccaaaatacattcattttttacccactgtaggcttccctctttggaggcattgattagtagatacgaaatccttatcttctctctagagtttgaaatgtataattaacaatggagtctgccagatcaacaattctcatcacagaatgtcctgtgttttagtctttgtggaccatatggttgatctaccttatcattgttattagtgtggacccttttttgtgttagtctttttcttacattttctacaatagttaaacaaaatatttatttttgttgttatatgattttaaaaaccttatattattcagcttagcctgaaagcccaactgtgcaacagaaaatggctcttctcttaattaattaatttcaatttgatgaattaactttaataacatgctaatgtatagaaagctactaaatttttcagaataagtgtattgaaatttctcttccaagagtgatgccagctttgcttcctttatttgtgagtgggaagtgaggtttaatgctacaatggccttctagaaaccctgaagcagtagtttgacaaggatggaaacgttgagatcattgaattattgagcttgaataaacttctgagcattcattgattaatttatcaaataaccatgtattaaacacttccatatgtcaggcactgtgctaagtgttggagataaaatgatgatcagggagaagatatccttctcctggttcaaatccgttgtctagttttcatcagcttttgagtcaatataatgtttaaggacatgagattctacagccaaatagaaggatttctattgctctttggttttgacatttaacttgaaaagtaacactaataatgactaatctataatctaagattatataagtatatgtataattacatataattacatattttatattgtgtatatatgcatatacatggatggaactggaggccattatccttaccaaaccaacacaggaacagaaaaccaaatactgcatattcttatttataagtgggagctaaatgatgagaacacatggacacatagaaggaaacacacactggggcctgtaggaagacagagggtgggaagagggagaggatcatcaaaaataactaatgagtgctaggcttaatacttggtgatgaaataatctgtacaacaaatccccatgacacaagtttacctacgtaacaaacctgcacttgtacccctgaagttaaaagttaaataaagaaaagaagcaccttttctatttattactgaaaaaatacatattgtaaaccttaaaaaataagagacgacaggttcttgagcagaaactgtgattcagaattttggattggctgcacttgaaatactaacataaagactggttttgccagtggaatctgagtttggaatttgactcctttttttcctgctactcccttccccagcttgtacatgaatgcagtcttctagctcatttaaattagttctttaacttatagcaactgaaagtagagtggtttgattttatcaactggaacaaacaactcaacagtttttgtagtttttgtctgttgctgtccctctccttttcagatgtcattaagtgactttcctgggcttaagagtctaccctgaggacctcaatactctggtttctgcccaagttgtctggtctacctcctgaactagcatgtctacaatctgaggaaatgcaccctaaattgataccctgatattttcagtgggctatggattggcaggaagagaccataaacacacactttatttaatttctgagttaattatccagggataaaagtattatcagaaacatggtggctacacaggaaagcaacagatgtagtattcactaaaacagcttcatttggtacccagagtccttcatagcagcaagcagctgatagagacactccatttgggggttgagtccttccaaatctttctggaaagctcaattctttctatgacacagtcttatgtgcttggggcttatgtcacattctaaaataattgacattgacaatcgatgcatgcccatttaaaggattgtttttgaacactggaatctgtcagttcttaatgcaaatgtagcatagcaaggccacatcttcttctggagcgggagttagaatccacgtgcagatgttctggacaaatggctttgcttccagatttgcaaaatgttcttgaaaacccttatccctataggcacagataccataagagaaaaaatagaaataagtaggaatcgggattgggatttgcttgaatctttacagcaagaccctctccatattttcagttttcaaaatcagtgaaatacttcagatcagtggtttgtaaattgctctgtggagacctcagattctttgataatgccagaggaggaaacataagtatttttcgtttgttaggacctcaatcattcctggataatgaattttcagaggggaatggacttggtttattttatagactgtttgagcctaaaggaaaatgactacacctcccaaagcagatgactaattttcagaaattgttttttggaaaagtgggtctcctttttaatttcccattcgcaccccatgtatgttctcttatcagtgaaggagatgagaagccactctggggaaaagacacgtagaagatcaagaaagctcttttcctcattgcgtgattgatactcggttttgttttttttgttgttgttgctgttgttttatgggagtcttgctctgttgtcaggctggagtccagtggcacaacctcggcccactgcaacctctgcctcccgggttcaagcaattctcctgcctcagcctctccagtagcagcgattacaggcgagcgccaccatgcccggctaatttttgtatttttagtagagatgcggtttcaccatgttggccaggatgatctcgatctcttgaccttgtgatccacctgcctcggcctcccaaagtgctgggattacaggcgtgagccaccacacctggccgattgatacttttttgttggttcattccagtgctgaaaattgggctggatttgccaaaacaaatctgaaactggctttctatgcctgtggattctgttcctattgtctgtccattcactgttctgtttagttcatggattaagactgtcagcatcacgaagtatcagcagtaggatgtttggtgcagggaagatgtgagcacctgcatatcttccctgcaccaaacatctgatactttttttttttgaggaaataaaagccccaaggaaccaagtacgacactttgacagtcattgggctttttgagcctgggccttgttaaggcagctgcctgtaccgttgtggaatcacttcagctactgtctagtcctcagtgctacagcctcagggcattgattttagctaataatagtggtcaacattaattgagcatttactatatgctaaacagtgtcctaagtgcttacttgtaggaactaattcagtcctcgcagtaactctaggagacagatactacactgtcattgtggatgggatggggtttgggtggggaattggggtggggcttgttggggaaagaatctaaagcacaaagatagctttcccaaggccatgctgctgatttgggtttggaactgggattaaaatccacattctcatgggttccaagcccatggttatagtcagtcattatgttccacttcctcactagctcttcatcaagtattatcagaaagcaaggaattatttttcagactagcagaaatttactagtgacttagtaatatgtcagaatgtcatggtagaaaatcattccagagctttgctgtttagtacagtagccacaatccacatctggctgctgagcacttgaaatgtgcctggtctgaattgaggtgtgttttacgtttaaaatcacactgtatattgaagacttaataccaaaaaaagtgaaagatcttagaaaaagtttcttatgttgattatatgttgaaatgataaaattttggatatattaggttaagtaaaatgtattattaaaactaacatcactggcttctttttacttttaaaaaatgtagccactagaaaatttataattacatatgccacttattttatattgctattggacattattctagagaattaaaaatgtgcaaattatccacagccatttcctcatacctgtgacactcagtcattcatccgaattagcttgtggtcagtttgaggcagtttgtctaacgtttgagttacgagatcagagcaagaggtgctggtccattttagacgtgctttatttagtttgtagaaaaacacactgaaccatcctattccgctacagagtgccccagcttcacaaagcagaatatggaagggtagactagtgaaaataagtaaatacagataaataggttatgacatgtagttgagattcagataagtggagcaagattccgcagattgcactgtattagtgacagtgagtgtattctaagagaggagaggatctttatgtgtggtaaaagtagctggggaccaagttgttgagaattttgtatgtcaggaaaaggaatgcatttggagtgacaaacttttgtcactttccaaagactccttttagaattctttattgatcaatagaatattttgtcgtgacttacttcataatttatgatatgttaaaatttccaaattttctgtttattttatgttagttacatcttagattgatgattccctggtggaatttggaaagacatcttaatcacaccagcagtatttatgtaaaccatttttaaggatggtttacttcttagttaactctaaaggaaggataatgtcatctattgaataaagattctcacttttctacttggagatcatattgtcttcttaaatctttgtcccttaggctttgataatggactacatctcatctgggggcctctcttctctgactgtattaaccatacttatcttggagttgaaagaccttggaaggaagccaggatctaacagtcagggtctatggatctttggcaagtattacaggcaggccctggatgtgtggagtaacagaggcctctaacgagggggcacaatagggttggcttatgtggacattacattctgaaattggcacatgaggttaaaaaatgcttataatcaaatttggcctggataaggcttttaaactactcctaaattagacgcttgaaagctccaaagccaggatttagcattgttgattttgctttgtatttcttctgagacacccctttccaggagacacggaagtcaggtctacttggaatgaggaaaagggttatgtggtaaatagaaaattctcagtccaggcacaatggctcacacctgtaatcccagcattttgggaggctgaggcaggagggtcactcaaggtcaggagttcaagaccagctgggcaacatagtgagtccccatttctacaaaattagctgggcatggtggaatacacctgtagtcccagctacttaggaggctgaggcaggagggtccattgagcccacaagttcgaggctgcagtgacccatgattgtatcactatacttcagtttgggagacagagcaagaccttgtctcaaaaacaacaacaaaatatcctactccctctcattttttccccaagagtattgaaagctgaatttgtgtaagttatacataaatatcatgcaacttcattgtactgcttattttcctaataagttaattgacttgtattatgctttacatattttgggcttgttacttgtttgtgcctaatgtatgaaaggcagctagaacctatctttctaaactgaagagctctaaatctggttagggaaatagacaagtaaatcaagggttataatgcaaattaagaagtactttaacaaggcctttcctcagtgctttaggaccacagaggaggagccattaaagtgatctgggcatgagtaaaggctgtatgtgacatcctagcctaagctaccatcatttctcattgcattggtgcaacaactttctaaatgctttctctgtttctgtttttgcccctggatctccctctctcccaagtctatagctccctagcagctgcagtattcctcttaaaaatgtaagaggcacatatgctcctatctactcaaaaccctccagtggctttccatcttgctcagaatcagagctcaagttctaaaaggcctataagaccttgtacaatctggcccttgctgcctctctatcctcatctccaatgtgcacctcctcattcaccctgatgcagccacaccaatctccttgatgttctttgaacatgctgttcacatgactgctcaagacttttgtccttactgtagtctgtctgcttggaattgtcattactcaaatgtctgtatggcttgttctctcatgtttccaaagctctgaagaaatgtcacttttttttttttttttttttgagatggagcttcactcttgttgcccaggatggagtgcaatggcatgatctcagcccaccacaacctccacctcctgggttcaagcgattctcctgccttagcctcttgagtagctgggattacaggcatgcaccaccatgtcagctaatgtttttctttcttttttttttttttttgtatttagtaaagcctgggtttcacagtgttaggctgatctcgaactcctgacctcaggtgatccacccacctcggcctcccaaagtgctgggattacaggcgtgtgccaccgcacccggccatgtcacagttttataggcctttcctgactaccctgtacaaataaaaacaagaataagcctccaccctatcctagcactccttcttccgtttagcttgtccatcaccatctaacatgccgtaaattcacttctttatttgccccatccccttagattttaaagttcatgaaagtaaaactgcatctgtgtcatctactttggaacagttcctggcacttagtattttaattcaatacatgtttgttgaatgaataacttacttttctctctggcatggcttccacatttatttgcctaatgagtggatcgataaatgaatgatgactatattctcttggcactagcagaatctgttatttcccaatgtaccatttctctgaaataactttacagttctttattggaacaaaagactttatcaggacttgtcaggagctcttggattctgccaagacagcatctcactcacagatggaaattgccattaattgtctgctttgatggtggagcacaacattggaaaagaagacgcctcctggaaagcaggttttgccattggtgagagagaataagagtgaattgggctggccacagcctccctcatattgagaaacccaattggtaatactcagctagcatacagattagtaatgtgtgagtgtctgcatgtgtgtgcatgcttccgtgtttatatattaccagtgtatgtgcgtacctttgtatatatgagtaaaaatatatatgaagtaaaaaatcaaaatctaataactcaaaatccaaagacttgaacaccccaagggaacactgaagtctcagcagaacccttgatgcttgggaaagtagaaatatagggaaggtttgcataattccctgtgttcacttctagctcactgaatgtgactttctgctgagcctaagcatacagcaatgaataacaacaatagtaacaacatgaggggtccctgctttcatagagcttgcattctagtaagtggggcaaaaagcaagcaaagaaatctaagttatatatggtggtataaatgctatgaggagaggaaataaagcacaatgagggagaagatgatggagtgcattttagaaatgggaattgatagaatctgggatttgcttgacaaaaagttgaaggagaagcagatgcaaagacctgagattcaggtgcttgttgaattcaagggacatgaaaaagaacaaattagggaaggtcaagttatataaagcctttaagccatggtaagaagtttggattttattctggttacaatgaaaaagccatcaagcgctatttagcaagggagtgactggtctgaattaggaaaacccccctggctgttctatggagggtggagtatggtgtgtgctagaagagacagaagatacatagatggctgttactgcaacccagggaggaaacatagcaatgtggattagagtagaagtgatgggaattgtaagtagatgagtgtgggatatattttggaggtagagtcaacaggatttattgatgaattgtacattgagtatgcgaggtgagtaactgaggataactttattagtcaagataagctaggctgtgttgtggcaacaaactgttccaaaatctcagaggcttaacacaaaagaggtttatttctcagtaatttgtatatccctgtgttttggctggtggctttgctttgtttattattgttcttactctaggacatgggatggcagggtaaccactaactggaacattgctggttgacattgaaaagggataaataaaatttaaagggtttcaccctgggagtgattaagcatttggcctcgacatgacacataacacttctgctcaaactaattggccagaagtaatcatatggctccatcctgcacaaggggccgataaatacaatcctgtcttgtgccaggagacaaaggactagagcctactcagacagcaacaccaatgactctatagtatcttcctggtttgaataactgttaatggcattatccaagtgcagatatttgaaaggaatgagctggggggatgtgaaatccatatttcttttttagccttttttagtttaaaagcctattgagtggagatgtcaagaagacacttggagatatgattcttaagatcggagaaaatctaggggtagagaaataaatttgagcatccacaacatgaatatgacacttaaagtatcaggacttataggtacctgttgagaaccctcaagttctatctttggattcctataaagaaggaattcctatagagaaggaatccaaagacagaacatgagggctctcaacaggtagagatcttacagagagaaaaccaacaaaggaaataaaaagagagaggttctcatggtagatagaaacacaagagagtattgaatcttaaaaggcctcaagaagtaagtattgcaagaaaaagggaatgctgagaggtcaaggaaaatgagatttaattattggatctggcaagctattgaccattttactggtttggtataaagaagaggctaatttaaagggggctgagaagagaatggtaagtgtggaattgatgaaaatggtcatagacaacttttggaagagttttgctgtaatcatagcagtaaagtggggtcagtagtgaaaagggacatggtgtcaagaagataggtggtcaggaaagggagcaggtttgtgggccagatgatggttttgtcttttgaaatatgctgacctgataaaaaggtattcaaatgaaaagcattcagatattagttggagatataagtcagacatagagaaaaaccagtgccagcataaacatggaggagccctcttcatagagaaaagagaacagggaacacagatgggctctgataggaaaagtatagagaaaaaagattgagcgctcacattaataaaatcaggagaaaaaagcagattatgtcctagaaatcaaggaaagaaagtttaaatacctttgcaagaggtttttcttcactttctatgttcctggaaatatgtagtctatattctgtactctctggccaaatttgaaggggatagtactgtagctgattaaatatataatctaagaactgtggaataaagataggattaaaggttttttaaatctcaaatcagtggggttgatgctctttgtgtttctgttctttttgttattgttttctcttgttattttgaaatttctctaaaaactacttaaaagtatagttagtgccatactcatcgttgtatttttcttcttttttacctcctcctcctccttcatcaccatcttcactaatgattatcactagcaaaataatcatcaccatcagacttcattaaattaactattttggtattttaataattcagagctatttttcataatttggttagaactactgaggggcattcattttagtataatagaacatttttatagcacttcttgttatttgagtacttattaaatgcttactttaaacatgggcataatttctgccctaagtccttttcagttaaatttcctaggaaagatacaagagttccaggatggaaaagaagtgctcagagggaatacaagagattaagaccacaaatatatggtatcactagaataatttggcagaggtttatttctatttaggttagttggctataataaacatatgtagataaatagtataggaatatagtacagggtaaaatggtgactcaatatcttaatatcaaatgaaaaatgggctgcttcctccttctaggctggaataatgtactattattgacaccccttctctggagtataatttggcttagttctggtggtctgttgagtggcttggtctcactctctttctctctctctctctctctcaacctctctcccctctcccccttcctcctctttctctctgcccttccttctggctgtccatccttctctccctcctccgctcctccccactatctctcacttctccaactcagttctttctatcagtgtcttgacatctaactagttaccctagagacctcaaagcaattattctttccttaaacattctttcaaaacccagtcgttccttaggcatattgacttgaatcatgtctatctttgccattgctaccttcttagttctaatattcatcattattttctgggttacctccatggcatcctaacttgtgcctgcctcttttgttttattccactccaatgatccctcctattcacatgcctctcctccaaccttctcccatcttagttattgtgcttaagaaaattatggatcatagaccaagtataggatagcagtgtgaggaagtagattgaaggagggagacataggagttggagttagaactagttcggaagttagattgtacttgtcaatgagagacttaatccagattccatctctctaggacagaatagaccatttctatctacatggagtatcccttacatgatatccatatttctctcttaacatcattgtacacatatgtttacatgtgtaacacttctactaaattgtaagctccttaaggtcagagaccatgtcctaacattcagtaagctctccatggttgtttgttgagtaaacaaataaaatatggtcttaaatagaaccagtgtcagaaggaatagggtggagaaaatgaatataaaaaagattggatatggaattaaatggacttagtaaaatattaattctgggacaatgaagagagaaggttcagatatatctacacaaatttgagcttaggtgaccattaacagaaataaggaagttgggaggaggaaccgatgagtttgcttttaggcaggttgattttaaagttctgtagagaattttaattttaggtggatgaattgttccagcagacaattcagatttgaagcctgaagctttggagggagttttggtctagaagtaaagatgtgttagtgagtgaaattaccaagacaccgcagtgaaaacaggaaagagagccttcatcagatgcgtgggggaagcctctttttaagaaatttggaaaaggagctgacagaaaatgagtctgaaaatgagaggcagaaatgagtcatcaaagagttacttggaaagtgtacagtcaggaaacccaggaaaagaggatgttgaggaaggagtgagagaaatgccagctattgcacagatattgcatattatgagaatggaggcctatataaatttgagtagtagaacatcagtaatattattttagaattatttgctcttgggttaaatatgttttctcttaggaagcaactaagttaaaacacgatatttagagtgctgcagagacaaggttgtaaaaattctctcctatatcatcggtggttgaataaaattcctttattggtttttcttggaactgtaccctctagccaaacagcccagtggaatccagtgatagaagccaaagaaataaaagctaagtgtctcaatttatcctgttgtcactttcagctttctctgctcattattagataccaagataagcaatagatttaggttttttgatggaattctagtggatgccttggctctctttgtcctggatctagggacactctagtcagattctcaaattttttcttttttcttttttgcacattcatggcttgaataagggtaagagagcccgggatagatgctaacaatctttcagattgttatctgaaatagatatcttgagatatgctgttagtattttcttcaaggcatgccatgttgttagcattttcttcaaggcagcccatgattaggccagaggaggaggatgccgctattcacttctaacctccatccttgaattatggtaaatacagaagatgcttgctggtcagaagagagttgactcattatgtcaggtagtaaaccaaaaattttctccctttatgatgaaagaaaacgcagataaaagcatgaccaataaacaagccataagaatggggaaaacagtgatgacacggggttagtgctatagaagttcccagaaaggtgtttgaaaactctgggcctataaatttaattatgtactattatttactaatattatatactaatatttactttgtttggaggtagaaacgctttactatccacttgtctttagtgtgaacactttcttaggaagcattaatgaaacacctaatactacctgcttccatggcagtccaaaattaagctctaaagattgaggagtcagaggtaaaggtcggtaggtttttctgtggtcttgacttcttctcaagatatctatttgatttccagtaataggaagtggctcccaattacatctattcccagggtccctccctattctcttgtcatcttgatttcagtttggcctgattagatggtactaagttttctatatggtaatttatattacaagaaaaattggtaaatggtgggatactgcttcaaatctgcagcaatataggtaggtgtctttggtgaggttttgtttgcaattataggattccctagatggggactctttcatgaaaaatcataacagcaagtggttgaataaaggttatttctagactgttttctccagactaattagagtagtacaagggccaaccatacagcctcatagtttcaagggtgctttgggagtcagatggacttgagtttaaatcttgcctctgccacataaaagctttgtgagcttggacaagtcatttacttctctcagcctcagttttctcatctgtaaaatgagataattatggcatcttatagaattgttgcgataatttcagatagtctaaatataaagcatttggcaggccaggcgcagtggctcacgcctgtaatcccagcactttgggaggccgaggtgggtggatcatgtgaggtcatgagttcaagacgagcctggccaacatagtgaaatcccgtctctactaataatacaaatattagctgagtgtgtggtggcacacgtctgcagtcccagctactcaggaggctgaggcaggagaattccttgaactcaggaggtgggggttgcagtgagccgagatcatgccactgcattccagcccaggcaacagagcgagactccatctcaaaaacaaaacaaaacaaaacaaacaaacaaaaataaagaaataaagcatttggcacagttcttggcacttagtatctagccttcattattagtcttagatggaaaactggatgcctcaatagacctggccaggacagcattcccacagtctccatcaagtcagcaagctttatcagctttatctctgatatttctttctagacagttcctctcctttttcatcattaccactactgctgtagacctgggcactaccttctcttagttggattttttggtaatacttatacacggttgccatgtagttctcataaaacttgttttgttttgttttgttttttcccccactgctcaaatacctgctctagatccctggtcctcagctttgtacttaagactatgatttggtatgagccagttttatcaatttaatcatctattttttattttcttcacgcatttctccccaaacacacatatcatccccaagccaataataattcctttcaaagtactttttgtacttttggtcttatgtatgtcatgttgcaatagcttttcaagttgattttcgtgtgtgtgtgtgtgtgtgtgtgtgtgtgtgtgtgtgtgtgtgtgtgtgtgtgtgttctcttgctttcttttagttcattccctatgtgaccaccagattaatcttttatataataccaacctgacctcgtcactcttctgaaccagagcgatttcctagtgcctttaggatcaagttaaaacttctacatcagctggatgcaggaggtcttctggggcatttttcagcctcaactcaactgtcactcccactatactgtgcaattcaactatattgattgctcttgagactacacatatgccaagatttctcactctcatttcttgccatccgtgctatttcttttaccttcctatttcaaaacctggctaatgccactcatttatcaggtctcaccttagtactccatcctttcaaaggcatttctgattgccccttccctctgcccacagcttgaattaagagctcatccctgatttcatggtagtttggaaatatctttttagaaacctttatcatgcaaattgctcattttgattttctgactgtctcctcttctaaaagaaggcttacttgcagtattttttaatctttgtatttccatagagcatgacactcaataaatatatgagtgtgtgaaaaactgaataaatgtgtgtatgtctgtttcttttaatagagtaagttattttagggaagggccaatgactcttttctgcttgtaggctccacgtttcctagcatggtcctttgtatataatagttgatcaataagtagtgtctgaataatgatatacatgtctatcttccccagatcattctaagtttttcagcaaaaagattgtgtcataagaattagatagcctccagcacaacgaattacaaatacttcatactctaatgcacatgtttaatttttgcttggagttgaacttaagttatggtgccttatgagagagtcaggcagcttctctgtactacataagcatgtactcgatgaagcttggggtcaaaaacctggaaactaagtttagttggaaatttaaatgctggagactggatgcatcctaggagtggattactagtattgatactcctagacaattttctattcttatttggttctttctccataaacctgaccagtccatgtatagcaagcctcaaaggatgcaagccttgttctggtgttttttattgcaagtcaaagtctatcaggagctgaggaatgagcagcagtgggagggtgtattaatttcctgtggttgctgtaacaaattatcacaaatttggtagcttaaaaatagtaattttattttctcataattctggaggtcataagtcagtttcactgggctaaaataaaggtgttaacagggctgcatgtcctcttaaatgtcaaggagagaatctgttgcttgactcttcccatttctgatagctgcccatattccttggcttgtggcccttaatctctatctccatattcacatcatctctctgtctgtatgtgtgatcttcctttgccttcatcttataaggattcaagtgcttgcatttagggtccacctggagaatacaggatagtctcacctcaagatccctaacttaatcacatctgtaaagactcctttccaaataaaataatatttacagtttccatggattaggatatatctttggggaacattattcagcctactacagagatacctttctctttttgtagattcaaagtgcttgatcttctaagaacattgtttgcttacagacatatttcaggagtaaatgacttccaaactgatggtccgttgaaaaaaagcctggggctgctgtcaggaaaggtctaatttaggtcagcctaatgccactgaacagatgtatatggcaacattcccaactcccattaggaaaataagccattaattaatacttattgaggagctgataagtaactggaagagctggtctgagttctggacaaggaatcagtgacaatcagtttccactgtctggctgttgtgggtagattgtggtccatctctgtaggataaagtgtgcacagttggcttggcactcactcttctgtgtccagcagtagctcttgccatctgtcttatcaagagaataaaaatgggtctaagttgtcactgggagattactgagtatcagtggacactatgagctcgagtgggcaaccccatgcaaggttagagcagggacttcaccaatgtttgaattagggaacttcagtacctaaaattgggatgcagatgtttcttgacttcttcatgtcttttccacctctttcatataatctaagggggatatggaccttggaggagtcttcctcaaggctttggcaggtgctcctaaacatgcttcatccatgcctacttgagtgtaatctgctatcttaagccacaggcaggagagatcaatttttctagtaacttcttttataatccagctagctgaagaagtgtgatcaaagaatcttaaaagtgtgatcttgaagaatcttagtttctcttctgttgtagagagaggatagtaatagttgctaagcctataggctctgaagccagacttatctctatttccatgctggctccactacttaatagctgtgtgagcttaggtagataataaaatctcagattcccagttttctcaattgtaaaatgaggataatagtaaccaatatatgcaaggtgccaggagatattctaagcatgttacatgtatttaaccttcttattctcacatcaaccctatgaggtaaatgtactattgttatcctacttcaaagatgggaaaactgaggtacagagagattaagtaacctgtctagatcacacagtaacaagtcgcagaacaagaatttcaactcagagtatatgcttcaactcagaatatacttcaactcagcatatttgctgttaactatattttatgctgcttcttgtgcctcagattgtgaggatcaaatagggtggccatctattccaggtcaccttggaaagttctgggtaatatctcctgtccaggtgaattattaatagtgcctccttcttttattctcaaaggtattgtcacatcttggtttgaatatatttcacatttggattaaatagtctttacatgtgaaacactaagaacaatgaccaacccataggaagctctctgttaatattagctatcactgtttctactactgccatcaccaccactgtcaccatcacccacattcatcccaagtctgggacccttagggttaggggattaacccaagttctgcaaaggcatgtcatgggagccactgttcccagttcccacacccgtagcagacattgctcgttgatcacagtacaacagtcttccttacttagtgtcatagacaaccattcgtgatagatcacgtttgagatgtgaaattaaaattatttatcacacctagttttatttaatctcagaatacaaaatcccagcgtatggagaatctgaatttagtctgagcttgtggttttatatgaaaacttatttgattcctagaagtgataatgaatttgggacctctttagacatcctatgtcccttttctccaatatttctttctacctatttctctattatttctacctcttcttttatataaatataaaagaaatttaattcatcagtttcctattctctgcctataattttatatgttataataaaagactattgaaatactaccaaagtggacacaatataaataaggcaacggagtgagtcatcataggaattacagttggcacccaagatcaaaggcttagaaaatctatctttaaatgtgatttgtgtaactggtagtgaaattcatttcaggttgattttgcatggcataagggacatctagtggtgatctaggtctctgcagatttactaaaggtaatgcaaactcataggtaaaagtattagggcctatataccatcaccttgaaagggagtcccaagaaaggaggggaccttttgttgcatgactacttttaagctagcaaagtgtaaagaaaccttttttggaaaaaaattaattcgagtaccagcatttctgtctatattattgtcagtttgcacccaactcttatttgctgcctcctgtaccaggttggaaatcattctgttatcagctacctgccaacctgacatattcttcctatcactttccccacctcttttgctgattgcagaggggctctttggagcactttgaaaagccacctgattaaagccttcattaggctagaagcagaagtgcttcacaggccaggcaagaaatactttgtaattgcttctgacgggcagatctcctttggcggttgttgagccatcaggaagccgtacagcactggtccacgtgtattttgtataaattagtgggcttgacattacaagaggttgcccctatacgcagtcatcttcttagccccagagttctggaacttacccattagcctgcacctctttatagaacccgtcttacgcatggttctgaactaactgcttctgtcacctggattgcttacaatacctgcttgcctcatgtgctactattgtttccaaccaactatgctagacttcttaaaggttctatttcattgaatgcttttacagtattttctatgactcttttgtctttgagcctctcagattagctttttctacaaaagctgtttggcatgcctattgtcatctattttctttcagagtagctgctaacagccagaagctgctagttatggccaaaggcctcattgttggagagtcgttcttgttctttgactctaggtagagaggatgaaggctctgagatactgtctcaaaacattcatgtgttttctatgacaagtcaaagctacattgtcatattagaggtgtccagtagccccttagcgtgcctcagagtgggaggtagtgttggcaccgaactttgtcagccagtctcttagaggatcttactggagtttgtgattgagcttttacttcttctgttagtgttctgctgagacatatacactaatgatagctgccactctggggtgcagaactttccatatagattgccttaaaaataaaagcaaattttctatgcatacatgccggggaaaactctactaaatattcagtggttccaagaaatgccttttaaccatttgtaatactttagctttctaccttttcatctcattacttattttcaggcagaatagatatagaggcttctttctgcattatagtcttcacagacttaaaggcatcaggaagtagcccttgtgattttccttgctcttcttcttcccatttttccacctcctcctgtaagcacgtactttgtgtcaggcattgagagatacagagagaaaaggcataggtttctccccttgagaggctcctggtctactggaagaaacagacaattccagcacaatgtgatagatacaatgatagcagttagaacatgaagccatgggggcggagaggaagaaatcagctgtgggtgggaatggagtgggtagaaatattgaagaaggtttctaaaaagaggtgatgcctaaactgtgcttcaagtggcgaatagtagttatccaggtagagaatccaggcaagatttatccctggaatgataaattggaggacctgctgaacttttgtcaaggctggtaacaatgaagtgaggactagatcaggaagaggtttttatataatgcttcaaagtttgcatttaattctgaagttgataaagaaccatcgaacaattttaagcagagaatgacatgttattcccagacatgttaatagtgagacgattagagtcatttctagtcctcggaataaaaataacagtagtttcctagtggttcagcaaggtatgttttaaatttcgtcatctttttaatcaaactgcttaaggcttcctttctactctaatagttacctttttcccctaattgcataatgtatatatttttagagcttttcataatcaggtaccacctattcacctcatcttaattcctctgctttgtgacatgtaacttttactctactggagttggtgccctcatcaaatattctaaaacagaaggaaatgtaggcattctctgggtaggtttgtttagtgcctaagaaaatgcaggaaatgagagtgtgtatttattgagcttctactatgtgccacacactttgctaaatacagggaatgcattggttatcacatcagaaacacacaacccatgtgtttatgacgcttagtttagaggatcgaaacagtgccatccctagcaaccagagggcacagaagtacagtttcaatcaagtttatggtcataggtccttgtacattaattgacatgacaaatatatctcactccaattttgatatgaaaaaatattccccccttaattgtccttcaactttctctgtgcatgttgttggcagcaattgtgtctcatggtctatcctccatggtctagagctaaagatacagtggttatttagtacatttacatgggattttgtttctaatattctaatatagctaatcaattcatattaacttggcttttgcgttagaggataagaaaagtggagaataggttcatctcaatttctggctctcagtgactggtagttaacctcctggagcactaccttgagaggattctgaggcttcatctgggttgagtggaagtagaatagaaatatgtctattgatgatgaatgccatctgctgggaaaggagggtagaggcacatatttgccaacatggctctaagaaatgggagagctgctatccagttgtgtctgaaaagattaactggcagctagaaacttttaaaactacccattgactagttctatctcggagaactacaccccctacttgccagttcatgtcttatgtctctgcctgggtctgtctatgtcaagttcttatttgttaacttagtagaagcttagtggactctgtgaaaatgataaagcttgaaagagcaagcctgtgatagactgtgatagactgagcctttatagtatccttaatgctctagaaacttgattgactggaaactttttctttttctttctttctttctttttttttgagatggagtctcactctgtcacccaggctggaatgcagtggcacaatctctgccacctgggttcaagcgattctcctgcttcagcctcccgagtagctgggattacaggcatccaccaccatgcctggctaatttttgtacttttagtagggacggggtttcaccatcttggccagcctggtcttgaactcctgaccttgttatccacctgcctcggcctcccaaagtgttgggattacaggcgtgagccactgcgcccggcctggaaattttttctataagatacacaaatacattgcagcctgttcctgatcagccatttaagtggaataaaagtcctaagaaagttcttcttgagaagaataaaattgagacctccactctgaacaggcatggagcattcaataaggcaaagggtcagaaatcttgcttaacttcttactgttcacatctgtaactgggcataaacctataggatcattttcctttcacaaagaatccatcaaataaatacttgttaaagcctacgcttaacttgagcaccggtagtaatgactcgcattatcagcggggcttttgggcttgcactcatggctctgtgattcatgagggcagaaaaactgactggcttacagctgtctctctttttctggctggcctgcctgcatgcctagataactgaatggcttttttcagaatgaggtatggtctaaggattttgctacttcaacgtcagtttcctggatcttttcttctactccagcttgccatatgtcccttttatattttcttggccactctcttacaaatagggccatagatcagagatggtggccccatctggtgaaatctagctttcagatacgctttgtttgacccatagagtgttggatcacatagaatttttaaaaattaattaactgtcaacattgtactattgatttcaactttatctggagtctttttaacttttattttgagctctagaacttggacattttctggctcctgccttgcaagtctgaacctcagttccagttttctatttttggtgcttagtgtttttgtctttggcagatcctgaccactgttaacaaaatataaagcatgaaaatggtggcatccatgcgatgcagcagttgggactatgagccccaggttggatgtcagctgtatctcagcaggtggagttagtttactgacccctgttagcaagaccagagatgcagatgtgactctggtcatgccagatattaggtttttcagactttgggatctaagaggaccatctgctgccacatttgtgcttggacttcactgttagagtttgatcaatggcatcctgtgatgaaaaatgatgttcatgaatatgaatctaaatctgagcaagtgtttggtgtgtgtgcatctcataaatgtcacattaggcaattaagtatatacaatttataaataagtatatgtaatttataaatacatatatgaagttcataaataaataatatataacttataaataaatatataaagttatgattttatagtttattaaatccagagtttttcttttgttatagccctgcctcttaggcttgacaattggcttagaagttatcctcaagagagaatctttctttttcttttcttattttttttgagatggagtctcagtctgtcacccaggctggagtgtagtggtgcgatatcagctcactgcaacctccacctccggagttcaagtgattctcccactgcaggatcccgagtagctgggattacaggcataccgcaccatacctgctaatttctgtatttttagtagagatggggtttcaccatgttggccatgctggtcttgaactcctggcctcaagtgatccacctgacttggcctcccaaagttctgggattacaggcgaaagcccctttgcccagcctgaatctttccttcttaatgactccatgctatactgtctgttgatttattctggcttttctcagtaaataacaaaattaatagtgatcgccatcacttattgagtgcttatcaagggtcagaaactatgtgaagtacttttatatgtgggaccatcatctcctttatttcttacagtcctatgtggtaagatattatctacattctacagtataagaacataggctgagacaagttaaatatcgtgcccaatgtaacacagttggtaaggtgtccaaaccctggttagggtgtctccaaaggccataatcatgaccatggcactaaactgctacttcaatctaacatctaatttaataaagatatgaacatttgttaagcacctatatagttaggagcaatttcagatgttaaaaggtgtaattcatatttcttgctcataaggtgttcgaaatctattgaaaagacaagacttgtgctgtacaaagataacaaagttgagagagttttaagtgatgagtgagtggagtggacagtttagcggagggagaaatcacagcaggcccaagtcatcagctgcctgagggagagaagggaagtggggcagagacagtgggatgtgtgattccgtggagaccccagaagcaagattctttcacaacacttcttagtcattcttttaccctgagtaggaacgttatgcaataataagattagcccagaagttttatctagaagctgtatcatcctggaagctgaagagaataagttcatttcattattatctattgtcaaaggattaaatttggaagggagataagtatatatttatttttttgcttgttgtgagtaaatgactttgcagttaggtatacagttgaaaagctttattgagatttgtagtcaactctgctccactcatggtaccccaatactggcttctccaccattccatttctccaacttcagaaaatgtccacagcgtccttactttccaacattctccactgatgtggagtggatcattggtgctcaggcctcaagtcacaaacctgtgagtgacatggtcttatccgctgacctggtgttttttattgaagttgtcctctatgcagatagtttaaaaacaagagaaaagaaagaccaggtggtaaacctcctattccttgtcaggagaaatagtgccaagaagccatctgggcactccagggcacatgcccacatcccctcattctttctagttcccttgctggagtgcatagggatggggcatttacaacagaacacgtggaaacacattctcagaaagttgagaacagagtggcctgggataagatggcagagggagagaagaaaatacttctctgagtggggactgtctctaattcttagtttattctcatgcacctgccttctaactcaaataccttggaagaatttgaagtaataagtgcatcatgtagggttagaatactctctctttttccaatcaagtgggttgggcaagagggcagacagcttcctcattggtaggtaataaaaggattctgatttatcagattgtgggatcaccaagtaccagagtagccagggaaattctcaaatggatttgaaaatcctagggaaggagcaccatttagagaggctggagagaagagaaaggcactgcagcctaggaaacccagtgaacaagaatgcagaagcaataacacctgggttcatacagaaacctttgaggtgacccctaagcggggaggtatagacatccattagaaatggattgtgcaggaggggaagggctttgcacatcaagatggacttgggtgtggtttttgtgcgtgactaaggggtttctgctttgtgtgtaggcatggggtacaggagggcctagaaattgccctctctggagcatatccttaccccagtgcagtcagagagataagggctcaagttctgtttatgcatttaatagcctacatgatcttgggcaagtatgtatccctgctgaactccatgtctgtaaaatggggctaatgctacctatttcatttgcttattgtgtatgatataaaacagtgtttgcaaagtacctggcacatggtaggctcttttcttatattgttccggctctcagcttgctttactcctggtattgctcctgtgtgtctctgtattaaagatcatggaggaatataagtatatttttttcctgagagactttgtcttaactttgagattctgtcctcagctgttttactgtctggtctcctaagcatgagtcacgtgtccaaacagcagtctttacaagcccatgggtgggatagtaagaccagcttgtcactgtttgtgactctgcttctgtacctcccagtctgtgtgacatcttcccccatggggagccgtttctactttgtctttaattgctcctcaccgaggcgacttgtcagccaaggctgctttctgtcatttgatgccacatctcttcctatttcagccagccatttggggacattcatttagttgacagtctgattttacagagaacattgtaccagacaataatttgccttgtaagggggtccagcagggtttcctgcctccatgctgacccagggtgccagtacacttctgcgtggctgtggctgtggttctgcacagagcaggtggggaaggtgaagatattaacaatggagagtcccagttgagcatcactgggctacaagtcccttgccctcctgtccttttcctcttggtagataaaccttcacagaacctcaattcaggaccctatccatttccaacagaaccccaacaccatgggagatgaagatataggattatttcttcctaggtttgtgtgccggtttagaattgtctgtgtcctactatgtctaacatcccacttgatcttgacaacagccctgtgagctgggaaagagggacagtttgtggaacagatatcgaggctcttacctttggaataaataaaatgggactcagaagggttattcagctgtcagtgagagtggtgttggctttttattcacaacagtgaaaactccatataaatagacaggtaatttcagggccatggagtagatagagcactcaccctcaaagagcctttgagagaagtctggttatctctgtctggccagtttctggcccttgcttctcttacctatgtcttcagaaatcttcattccggctattcaccttctctcccagtctcagttaggtacccttctcacagaagagttcctcttcactgctcttgtatcttgttaaaaggcttttttttccctcctttttattctgtccccagcctgctgtagcaatgcctgatctctctttctatttattgttccatggagccaaacctccttctgtccctttgggatgacctattgttatacattaataattaacctttactaggaactctagtcacaggcatttaacccaaatgcagaaaaagccaaagtttgtttatgacaaagagttctcacatgctaaggtataatagtgaaggttagaaaggagaagctgacactcattaaacttttatgatttcttttctggtttactcacttgagtgattgcctgaggatcctgcaatatttccctttgcacatggtcagcccagtttagctaaaatgaaaaattcagcttttgaattgtgaagttgagcatgcatgactttccatgtaatgttaaagataagcctcacaggtgctgctagtggggcctggttctgagcatatggaccctggggcccaaatgcctaggttcaagtcctgctctgccacttatcagctgtgtgcctgtgggccggttccctaactgctctctgtgtctgtttctgcatctgtaaaataaggcaatgattacaggtatctcaaatgggtgttgtctgtatctaatgggatggagaggtgttaaatccttaccatggtgcctggtggtaggtgcttaataagtgttagtatcattattttcaatgttattgactatggttaggtccacggtcaaggttacataatagtgagtcattttcaatgcttcgccatagttatatatcactcttgtaatatccattagaatgcaaacagctttgcttgattctctcctggtgatgagagatgggaactaattctacatttaaatattggggattatatgatatgtgctggagtgacccatccaattaactttgtctcacagatatggacagatgaggcttattttagaaattagccattgttgttttggagatgataatgcaaccttttcagggctgtggaaatagcgaaatgagattaacaataaccctccaaatagctgcgacttttgtgcccttatgatattgcattcctaagtgcttcacatgttttaaatcattttattattacaaaataaatagtttgtttattcctatgttcccaatttcaggagaggaaacagactcagaaaatttactttgccaaagtcacatagcttgtaagtagtaaatgtggaattcaaacctaaatctgggtcctgacttagaatttgaataaggtaatataaagaaaataggaaaatagttgggacgctcaatactcagatccttgtctatttcccttccattgttttctgcttattaagtttttatggatacgacattgctcagagatcagagcgccaaaaaccattccagggtactgtatcaaatttcagttcaaataagagtaaaacttttttgaaattctaatttcatggagaaagattaatttctgcttttagatggattatacctggtttagaaagtcataacagatttttttcccataggttattggggttcaggtggtgtttggttacatgaataagttcttaagtggttatttgtgcgattttggtgcactcatcacccaagcagtatacactgcaccctatttgtagtcttttattcctcaccctcatcacacccttcccctcaagtccccaaagtccatgtatcattcttatgcctttgcgtcttcatagcttagctcccacatatcagtgagaacatacaatgttcggttttccattcctgagttacttcacttagaataatagtttccagtcttatccaggtcactgcaaatgccattaattcattcctttttatggctgagtagtattcatatatatatatcacattttcttgatccacttgttgattgatgaacgtttgggttggttccacaattttgcaattggaaattgtgctgctatacacatgcctgtgcaagtatctttttcttataatgacttcttttcctctgggtagatacccagtagtgggattgctggatcaaatggtagttctacttttagttctttaagggatctccacactgttttccatagtggctgttagacagtcataacagatttttttaactgccatcctcacgttctccacctacctacccactctgcaggacagtggccatggctttgcagaagtgtacactaaccttgggtagggcatggaggcagaaagctctgctggacccccttgcaaggtgaattagtatctggttcagtattctttgtaaaatcagactctcaactaaatcaatgtccttgactgactggctgaaatagggcttcagggtgtctcattctaccactgtacagagggcacatgcaatgtgcaaaaaataaaaacaaaaacagacctctgtccccaccagcttttaacacttactcttttctttcaagtaatatatccacatggttgaaaaaaagtctaacactgtaagagggcacagtgaaaagtaagtcaccctcccactccagaatattaatcccgcaaatatactccccaatgacaattttatagttccaaagagactttatgcttactggagcatatatacatataatgcccccacgcccccacacttttacacaatgataacataatgcaccctctatcctgttccttgacaatttcacttaacaatgtgacctggagagcttccacatcaaaaccaaaagcaataccttgtttgcaaggcctgcctaatattccattataacgctgtgccatctgctattgatggtcatttaggttgtttctggtattttactaagggtgcttcagtaaatcactttgtatgaagtatgtgaatccatgcaactcgatctctcttgatttttatttgcaagcttatgttgtataactttctgacaacacaagaaattggccaggagacaaaagaaattctgtagaaatatagaggcttttttggagcttgtgtgcacatcagatgtttcttcagatacctttttggttcctgtgtctcattgtttctcatgttgttttgggctatgtcctgaagcctctttttgggtcatttttccaggtgcccagtgagtgatggatggatactgtttgcaagattgattcacatggcacttttgtttggcttttgacaggttgtttataagaataatgacatccgtctggagctgtctcgcctggcccggattgcggacaccaagatgaaaatctatggcgaagttgtgtttaagtgtgagaatgtggccacactggaccccatcaactttgagaccccagaggcttacatcagcttgcccaagtggaacactaaacgtatgggctccatctcctttgacttccgcaccacagagcccaatggcctgatcctcttcactcatggaaagccccaagagaggaaggatgctcggagccagaagaatacaaaagtagacttctttgccgtggaactcctcgatggcaacctgtacttgctgcttgacatgggctctggcaccatcaaagtgaaagccactcagaagaaagccaatgatggggaatggtaccatgtggacattcagcgagatggcagatcaggtaggaagaggcaggatgtgtgactgagactagacgaaagctgtagcttctcagtttgttttttggctttatgtttcttaattttcacccttgcatgcttgttgattcttttgctactctctttaatggctgttgtaaaattatgtttctgaaaagatacctgtctcatagatggctcacattctccgcttatctctcttgtcactcactgcgcaattgtctcagtgatagctctacgatcctggagctaaggatggttttacaagtagcatttccactgctaccagagcaactctcatgtcactggtgtgatccgcccccattgccccattctttgcttctctttttcctcatcaccatggaaaccgattgtgacatcacagatgctgcattatgtgattattttgtaggataaacttcactgtgcaagaatttatgcaacaatacacccttcagtaattggcaagagtcatgttgcatggagaaattatgacaagaaaggaaaaggcaaattgatttttcctgaagatacattcaatttaaagccttcctttggtgtaaaagcctatatttcactctttgttcagacctcactaactctctcttcctcttcataaccttttacattttgtttaaatggctttgtttctgcagctgcagatcaaacaagctagccccaggcagtacatagctactatggaatagtaacaaagtgggggtgggggtggggcaaaatagtcaggggtttttgaatgcctggacagtctgcctagctttctatggaccatgtggcaatgaaggtcacattctgtgctatcagaaagggcattttcccaagagcagtaattagagcatttgccatttcagactcatttcctgattctccatttaggtaggatgtactcaagaagggtcttggcttcatgtgccatatttatagagattcactttcctgatgaacattaaaaagtctctatttggatattttctttctaggtacatttggccagtaagagagagcaataagttccccaaaaggctgaaactgggagtgactgagctttggtgggttggcttttctgcataattccaaagctaggctgacggcagagatagcaatattgcccttaggaagagctggatgggttctttgcagagggcagatgggtggcagattgcagccctggctattttattgcccagtaggaatctttactggttgtctgaaatctgatcagaaccaagagccttcaaattaaatgtgctcgttaagcaagaatgaatagtgtctacccttttacacagaaaaacacccaaaaaattaatttctttggaggctaaatcccgccacaccccccatacttcttcttcttcttttctttctccttctctgcttttcagtaaaatgacagcaagagcagagtcagaaagctgttccagaattataaagaaaacactgctgttggtttttaagagcatgtgtttgggatctctgaggttaggtcacggtggacgggttttgtgtctgactaacctagaccttggcacagcataaaagttaccttacccgtgtctcaggcaggctaaaacacacaaaattgccatttgttcatttctgtctgttcctaatacaaatttttctttcaaacaattttgaacaaaggggaacagtttttgttgtttaaaccaccagtggacccaacttcaacaaatatgtttgaatttcagaagtcttaaatttcatacctgggagctaaagcactggctaattcttttctcttttttttttttttttttttttttgagacagagtttctctcttgctgcccaggctggagtgcaatggcgcagtctcggctcactgcaaactctaccttccaggttcaagtgattctcctgccttacctcccaagtagctgggattacaggcaccctccaccaagcccagctaatttttgtctatttagtagagacagggtttcaccatgttggccaggccaatctcgaactcctgacctcagatgatcaacccatctcggcctcccaaagtgctgggattacaggagtaagccactgtgccaggcctggccagttttttgaactactgatgaatttgatcaaagcctattaaaaacttactgagtaaacaaacaattgtcccatgaaagcagtataatctaaaattttaatacagtctgttaaactttcattttttcatgagaatgttttctggtaacttgttttagattataaatctatactaaaggatagttataaaaacaagtgtatctaaatgtggtgcctccttccctgataatcttgaagaataatataacaaacagtgatctagaaaaacttttatgatcactcctcacttgggcaagtcagtcttagaacttgttaagtgcattcaaaactgttatggtcacacattcagagaacagattttcctcaggttgtatttaaggctctaaaatttaaattgattctagtattgtctttacttggcaatagatgtctccccattttagttggtgatcagattagccctgtggacctgtgaggggtaaagaaagaaaactatgcaacagagaaaatagtaagagatagagacctcaacttcctcctttgtaagatagagaaaataataactcctacctcccaatattgttttgaggatcaagtccaaaaatgcacataaaatagttaaaatggtagccaggacattattgttgttatataagtgtttgaaagattgaaaaacaaaaggcaaagcatatttctctaggagtaaacttctaggagggagtagtgaagcagattgttaaattccccttaatatcctttctatgcttctactcttgtgttgactttgcactttatttattgtttttaactttagttaattaattaattaaatttcttgagagctagtctcactctgccacccagcttggagtgcagtggcacgatctcagctctctgcaatccccacctcccgggtccaaggaattctcctgcctcaacctctcgagtagctgggattacaggtgcctgccaccacacctggctaatttttgtatttttagtaaagatggggtttcaccatgttggccaggttggtcttgaactcctgacctcaagtgatctgcccgcctcagcctcccaaagtgctgggattacaggcgtgagccaccacacccagccgactttgtactttaaagtgtatgtttcattcttgatcacgtctgatcttcgcagcccttcaggttatatacccttcataactgaagaaactgagaatcagacagaggtgaaggctgactgatggatggcatgacccatttatcttgataccaataaagcacatcaagaataataaatacctattttaaaatttctgacaggaagtttagatatcacctagtccatttccttaattttccagttcgggaaattgagccataaagtggttcagggattggcctagggtcataaagacatttaggactagaatccctgctctcaaggtcccaggttagcttgtggggtttcatcttctacaatctcatttgatgctgtccaaactccaaccccttcctgggtctgcttagctctctgacttgatctcctgctcaccccctcttgccttctctattctagccacacatctgcctacctcagggcctttgtaggtgccatcccctctgcctggcatgctctctctcctggactttgcatggctgaatccttctcaacattctggtttcagcttcacttttacctgcctagagagaccttcagtgactctacattttaaagtagaatgcatgagtaactagcacaccacccattttactctcttcatagcaactgcccttagctaatttatttcatttattgggttacttattgtattagtctgttctcatgctgctaataaagacaaacccaagactggataatttataaaggaaagatgtttaattgactcactattcagcatggctggggaggcctcaggacacttacaatcatggtggaaggagaagcaaacacgtccttcttcatatggcagcaggagagagagaagtgcagtgccagccagagaaatgccagatacttataaaaccatcagatcttgtgagaactcactcactatcatgagaacaacatggaggtaatgtccccataattcaattcacttcccaccaggtctgtcccacaacatgcagggattatgggaatggcaattcaagataagatttgggtgggaacacagccaaaccatatcatttattttttgtccctctgttctggaacatctgctcaatgagaggagagacatgcctatcaagttcatctcagtgcctagaactataccagagacagaataggtcttccatacacatttattaaatgattaaataaggaataatgtttcagttaaaatgtgtcacagggaatgctcaaaatattcactggcagggctggtagtgaatgcccaatctagagagtaccagtgcatggagagagagacagaagaggaagttccatcttttgggggttggtgagcccttgaagaaaactcaggcaaacatatggaggcctcattctgtctcagtcactcttaaaagcactttgcatatattcactcatttaatcacaccaacctatgaggtggggacagttattttcccattttacaaatgaggaaactgaggcacaggaaggtgaagtcacttcttcacggttatacagctcatacatattagagctggaatttaaatacaggcaggaactgtgctgctctcaacctgtatggtctcagccaagagggttaagtagagaaaagatacactagatgttaggtcactgagatttttctgggtcttcctaagggccagcttgacttagctggcagagattggaaccaaacggcctacattgtcttttccattgtcttgtaacatctaattctcttgcttacattgttctctcctggccagccaatggctgggctcagcactcacctgttaggtttcttacatttggttaagcaactggcagactcacctgagatctgtcttcccaccccaggtactatatcagtgaacagcaggcgcacgccattcaccgccagtggggagagcgagatcctggacctggaaggagacatgtacctgggagggctgccggagaaccgtgctggccttattctccccaccgagctgtggactgccatgctcaactatggctacgtgggctgcatccgcgacctattcattgatgggcgcagcaagaacattcgacagctggcagagatgcagaatgctgcgggtgtcaagtcctcctgttcacggatgagtgccaagcagtgtgacagctacccctgcaagaataatgctgtgtgcaaggacggctggaaccgcttcatctgcgactgcaccggcaccggatactggggaagaacctgcgaaaggggtgagtcggcctagaggatggcaagtgagggcctgagtggggctgatgtgttacagttggatccctgggcagcccaagccttcgcacctacctgcactttctttcttccaagagtttttgggtttactgatttccagattgcaccctttctagttctgaatgcttgggtttgtttggctaagactgagttgcagaaagggaagctttataataaatattactgtgattatgatactttttgattaaatattttctatttagagagggtaaataattctcttttgggactccagggggcctagccaactggctgttttattcattcatttgacttgtgattctttagtgctttctacaagctaactcctgggttaggctttagaaatacaatgttgaacaagacaggtacatcgctgtttttatggagcttgctgcctagtggaatatttagccattaaataactgattacaaacatggtgagttttataagaggcagagtgatgtattagttaagaacataaactctggggccagactgggtgagaaatctggccctcatgcagtgatgggaatttcatcatggtagtcaatatctttgaaacttgacttcctcatttgtaaaatagaaatcaggtacctacctcacaagatactgatgatgattaaatgagttaataggttctcgagcatttaatgttagtgattattatagtcataattattctcatcaacatcattaaagagaaggtatagagaagcttgggaggcccttggaaggagacctaacataccatacaggttcactgtatagtgagcaaccctgacagttgaggacctgaacaaagtccagaatggactggatgctttgttcccttctgaaaaatgtccagaatagaattggggaactgttggggtggggaggaggggcatgagaggggaccaaagagatgagggctgaccctgtagactgggccagaatgctgggaggattcccttttcgttcaccacttcagtatctgacatttgcacccgatttacagtttaagtaaagggcatagataaaggcaagaagagggacaacatcaacacaaggagattccagtcaagctatttgcagattgcagcttggtctatttttttatatgccaagcacacagaatcaagctgaatatccgcaggctgtcaacttctatattcaatgaaaggataatttgcatcaggatcaagtttttgctaagggtatagctctagggctttgagaatgctgtacctgtatagttcttgccctcaagaagattatcatttatttagctgaggagttgagacatctatataataagctgtaataagatgatgtaagacagtagcatgttagtggacagaaaagaaggacatggagattcagagacagaagaacgttttgaggagagacctgcagggtctcatctctacagaccagtggccagtggcctatcagaagataggtgatgtggatggatcctgggccaggtctagaacaagggctgaatgaccagttttcaaggcctgtttttttgtaaggccaactgtggggccaactgtgttactagctaaggtatatttcaagagaactacaaaccctttttacagtcagatcagaaatagaatacaggacatgaggacaaaggaagaaaagagagctttcttggagcatatggaattaaaattaaaattcactgaattttcaagtcagcaaccaccagaacaggagctatgataaggaaatactcatctgggacaggaataggccacaaggggctggtcagtctgtcaggtgcctgggctctttccaagtatgtttgtagggtaacctaccctggtgctggttggggaagatagaaaggtcatttttgtctctgagatgcgtgagacagttttggtgtttgccaaagtgttgcagatcttctgttgtctatgaagacagtataaaggtcatctcagacatctcacttcttcttgggtctcctcttaactcaagcaagggccttgtgattgtcagaggcaggacacagtgactgtagccagctgtacaaggtgtctctgagctcacccatttcaagggtgaatcaacgggagttggtccaaaacttgccaagaacagtgaaagtcactgcaccttttacattgtcacttctgactagtcattaaaaggcagctgattggggatatatgagggacaattattcttggtgcagtgcagccaagagtcatccattctggccaaatgagaagaagcttagcaaatttaagatatttgatctatacatcgctcaaatcccagacggttcaactgattgttttgttcccctactaattgttttttgcccctggattgttcctgacaccatgttcagaatgaatcagtggagtgtaaaaattataggactcttctctgctagcaaagaaaagttgagattcccaatgacattgtttttctttatggaaactgattccttagtggagactcttttgagtatcttttgttcatttttcctgcaggaagttgacatatattgaagccctagtgtgttccaggcactatgtttgaggttggaaatgcaacaaacaaaaaatccaaaacagaaacaccaacttgacacggcctttacttgtgaacaaggggtgtatagtcctcccaggaagcaaaggaaaatgtgagaaatgtttaacatgtggttaatgttatggcagatgtctatagggaaacagtaggacaaacaggcaagaatggccacttctatatggaaggagtgatggcccagagaaggggatccaagctttcttggattttagatttcctatttctaactttaggcatccactctaggcacttctgaagaagaatgaagaaaatgtattgggtattctctctatacaggaatggaatacttttcggattaaggagccctgccccattcaccataacaacatcaacacaatcactcagtttgccattctctctctaatttttattatgtagaagcattctagaatcaagtctaagtctagaatggatcatttgtactaaatgtgttaagcctaagacaattcttaaggctgtgtgtcccagtagctcaaactgtgttctctactggaacttccttgggggtgagtccattggtataactgggcccacacatgaatgggagtgttagaaagaagcacttgtgtatatacactgaagaaagcatagatggaatgctgaaaactggagttttcatggcccaggtcagacactagacactacatcaaaatagaccaatgacccaagcaaagtcagcaacagataaatctaagagacaattcctggatcaaagtcatcagccaagtataagagagtcagagaataaggcctgggaagtagaaagtgtgtatatgatactaagattaatttgcatgtgtatgtttctcttacagtaaaattggataactcctgcttctaccctcataagagtgcttcttctgcctgtgaagatgagctactctaaatcttgatgtctaaaaataggcttgattgatattgtatttagatttttttcagcataatctgttgctattctaagatgtagctgtctctacctatcccaactgtttagctctaattatttttgttggctattcatagtgatgtgagagacgtctccatgacctaaacagcaaaggcctgttttaactacttaattctaatcagataggttgaaattctttagtatcatagaataccacctaccatccagtgaagtcctgttggacagaggaaacagtctagctggtctttagcctgctctggagttagtcctacttaaggagctatgatcacttgacctgggacaacatcttatctttgctggtatagccaaactgtctagttcaattggtgagcatcaagttccagcaaggcaaagccaagggtttgatttatttgtacatcatggagcttaaattttagaccattgctgaatctatgctcttccctgaatggctttttctaaacatatcctggcattcatttggcaagaaagtaaataaagctcagcacaagttcatcccaatgtcaagaaaaataacctacagtacaacatttatctgacatatgcaccagctgaacacgaagaatacaagtatttttacttctctccagtgactcttgttccagtgggaaaggcatgcaggcagcagctgctgctcctctccattcggggcctccctttttaggcaacctcctatgtgatcctgggtagcagcagcagcagcaaaagcaaatgattctgcctggaaagggtgagataccaatcttcgatgaggctggattgtgtcattgaaatgctacatatatgccacatggaaatcatgtcataagaaaatagtagggttggcagaggccaggagtggtggctcatgcctgtaatcccagcactttgggaggctgaggtgggtgggtcacctgaggtcaggagttcaagaccagcctgtccaacatggcaaaaccccgtctctactaaaaatacaaaaattagctgggcttggtggtgcatgcctgcaatcccagctactcaggaggctgaggcatgagaatcacttgaatctgggaggtggaggttgcagtgagccaagatcatgcagttgcactccagcctgggtgacagagtgactccgtctcaagaaaaagaaaagaaaatagtgaaaatagtagggttggcagataccgttagtgttacctgcacctcattcctgttttggtaaatgaggaattggaagccctgagaagttaagtcaacatcagtttagcttggaattgctatagaatggttagaatttatgattcctgattcctaatgcatcaggctttccattacattgagcagcctttccttcatatatactgttatatacatatactagatggttattaaatgtgggagggctccagggtttctgttttaggtctcttcttggcctgcacggttcccttggtgctcttattctttgccacgatattaaaggtcatctatatgttagtgacttccaaattgaggtctcttgcctagaactctccctgaaatctcagattcttatgtccctagttgtctacttgacatctccatttggatatctgatagattaacttaagctacttaattaatagctacttaatacatagctacttaattctaatcagataggttgaaattcttgaatatactggaagagcacctgccaccctgtgaagtcctgttggacttaatcgtatcatggaacagcttaatcatatcattgaaaagcagaaatcttgaggtcttccttcctgccccagacttcttttactttcagtttttccccttcttggtaaatggcatccctactgtccttgggcattttcttttatttttgtcctatgatattcaatctatctcagcaagtctcatccatttctcttataaacccatcctgcatctgtccactctctcttccatctctatcattttagatcaaaccatacttatcacttctttggacaactatatagcatgtagtatatgattatgaaaaatccaaattcattttgtgtcttctttagaatattaaagttaaattattaaaatttctatattctcaacacagtctatcttaaatagctttagtttcagtggcttttggtccagaaaactgtaggaaatgaagctatgatgcttctttggaattaacttcagcattaacatagagattccataaacaggtatttagctcttttctgtgtcaggctttgtgagctgatgaggatatacatttatattaagagaagacacactttctgtcctccacgagctcacagcacagcagaggggatagagacataatctgcaaactctaatgcaatctaccagtgtcaatgattcaggaaataatcacaggaaagaaaaagataacaattagaaagcaagatatgacgcacattttataccattttataattagttctggattcactgaggtcttgctcagactatctcactggtgtgggaataagagaaacctgggcttccaaggtcaaatataataatggtggttgctttcactggtctcagtgctattgaggaggggaatctgcgttatggctgtgccctcatccctcgtaggtttccagatcctttatttaaatgtctgacctggagatggatcctctgacctttcttttctgcaagaataaaatgaggcagttgggtttcacgctctctcaggcccttttcaactctaaaactctgattctcaaatgtcatcagcttggcaatgctttctcttatcccaaggagagagagaaaggtgaatgaagggcagcaatgtgagtccttgttccttacaatccgcagaactgtctggattaggactcggtttagttatatcagcactgcaatcaaattttcatctccctgattcattcatccaagaaaatgaataccttggtgtactgagtacacttcaggtccatcagacctgagttttaattgatggattaacgaatcgaaccttagatttctaaagagcattaaaaggctgtttcctctttggtccattgtttactctttttgatagataatgacatgtatctgagaaaggggcttcccaagaaatgtgcaattcatttacataaatcaaactgtctccttttttttttgtttgtttttttgcttttctgttgttgcttaagtcatacaaatgtatccctggtgacagccaccagcagagcacagattcagcctctttttttttttaacttccggttctgcaagtttccctttccacaagcacagggttttatgattgcagaaagcttttccatagtacatgaaccctagctgagagttattccaccaggtgagagtctgagctacctctgatcacagctggtcctgttactctaaaaaagagtatcaggattgtagattccggttattctagagtcttgaaggtttcgaggtctaagaaggacaggctggggactttggagatcttttaagaatcgacacctgcattcaacctgagaatgtgagggtcagcactttggtgcagtgtgtgacagctgcttatgaaccaacggcacacctgctgctggctgcagtgctgtcaaatgcagggactcggtggccatttacattgccactgtgtatctttattactgtgtgtgctcaaagcagcttaactgccagcagacatctgcccataataatgcaataattgaaatgctgctaaattatgagaaacaagtgctttgaaacacaacacaaggggattgttgcaggcttttctagcatctctggcttcatgtttcttttcacagagagatgaatccttcttcactacagtttggattaagaagaaaggaaagttaaaagacctactatttattgaaaaaaatgatgtgccttctctatgtttggttcttaatatatactgagtcatttaaccctcacatccactctgcagactgcatattattatcctcactttctacgtgaagaaattaagggccacccaattcattctgaatacctactgagtgctacgtgccagggactgtgttgagcacttgggacacaaaggcattgactgtggttctcataaatgtgctattatattctggtatctgagcaattgggacatgagtgtggggagaaatatcatggaaggcatcacagactggtgccactagagctgaggcttggtggagaatcaaagatctccccggcagaccaggcaggggaaaaaaaattccaggcagaaggaacagatgtataaaggtgacttcaataaacagtaagttttccatgtgggtggcatgtagggcttaaagagtgaggaggagggatttgaggggaagttttcgaagatgcagctgtaggggtgacagggccagccagccatgaaacactttgctctcccaacaagtttaggcattatcttataggaagcataccacgtttaacaatgggataaccaggtcagatcactgaggcagaagataaattgaatacagaagacaggagaccaacaggtcagcatataatagtccagtttgcattggtattaattcaggaatgagagataagagccctccctgaagaaacaagagtggaggtcgagttttcgaacatatctgataaataaaaaaggggcaatgtcaataggacttagttagtaatcaattacacacagctaaagaatagctgaaattgaattagagcaagggtttggccatggaagccttttgcttcttcctttcttctgagccatcttgaatcagtgggagattcttaggaggagtggggaggactgtggtgaccattaagcagatgtagctgagagtcaaacctacacctgctttggtcccactcggaacatatgtatttaccttctcaccttctctctgtgcctccgtttcaatatttgccatgacaatattggcagtgggtgtttaactggcttattgtgaggctccattgtagaatcaaagtgtataatgtgctcacatagataacaaagttaatattcccctttcagaatctggagtttagcaatgcaagaattgaaaaaatgatctggctggtgtttttactccatttttttttttcttgtgtggtggaaatgacccaggtcttatttctgtgtttaaggcatatgatacaggttagagtttaaaattgagaaggttggaccataagagaacataccaaagcatgcctttcttcatactttaaatggtgtatttggaattaaaatgtgactcttttgtaatcccgggttttaaagaattgcattaaaatgatctgttatgactgtagtgatctcaaccaagctttggcatatgtttggtagaaacaatgagttgtagtttgtctctctttgtcttgtaaaactggccatatttgaaattaagctaaaagattttttttccttggagatagaaaaatcatattttgaacttctccctattctggtctctcatttgggatttatagtgatgacacccgatactgagtattacgtatgtgtctgtgcctagagcacatgtgtatagttttcctctagcttctgagaagttttctgttttatcatgggttctgttttaatcccaccaaggactgttaagaggaaaaagcagcaaacatgtagtaatcaagaatagaagtcccaaacttaaaacctaaaacttgactgacccaacaaaaaccaggcagagtataaagagttgtgtaattacttatcttgccagtagaatagatgctcagatactatctagcaaaaccacccacccccaattttagatgaagaaactgaggcctccaggtgggaaatgagtggtcaatagaatagaatagaatgttcttagtccctcgttttggttcctatttattggctttttcaaagaaatatacatgcatctgtgcatctgtgcatatttgtgaagatatacttttatgtctcatgatcttctaggcagtagtcatgccgttatagcaaagccatttggtaaatctccagtaatttgttctaactgataaattttatttgaaatgttggcaactgatttagagggaggaaatgtggagggaagagatgtatatatttctcttctctttctgtttcatcacttatcccatcttaccccaacaaataacccagcccaacagagaggatactggggtgacaagtacatctggaacttgaggctggacccttcaatatgagtggctcttgaaagacccccttctgtgggctactggacagctatttttctgccaggtagatgcagtctttcttggagaagatcatttcatgcttcttagcatgtttaacctttatagcaagacactcttatcaaaatgacaaaccccaacagagccttctaagaggccagtaaatcagaagcctcatgaaatctgtgcgattagcatgttccccctctttgtttctgcagggtaagaaagccctgtgcatttcagatttcaatcttctctgcaggccccttgtttgaaacctcctgctgtggctcactggtatttaaatactgttttcattcagtcacctggggccacatactgacatcagctaaggctggcacattgtttatctccatcagcaatgttgtaaagaaaagataactgctctgatgtttgtttagttgaattctccccatcctggaaagcatcctttctgggtctgaagatagcagctgattcctaatgtcatcattcctgtagtagctcactgttgctcagcaggatctcatctccagccagttagttgtctctgatctctttgtcccatggctcagtctgtaatgaaactttcacaagcaacctagcatcttcagccactataaggtggagcctccttctgtggaaatccacaaagtcaaggctatattgagagtagaggtagaaggagaaaaaaatgatgaataacagttctgttgtctgtatagatgataaaatatttattagggattgtggggggtgactcttttatcggagtttacacatccatattttcaagttggaaaggacctctgaggtttttgagtctaactcaatatctgatgcatatatacccctggacaaaattcctaaattgctgtgtagagtctataggaatatgtactcttatctacatatgatgtactaaatgcttagcagtggttagcttatttaatctttgcaataactacataagatatgtgctattttcattcttaatttatatctgaggaattggggttaaggataggttaagtaacttgctcaaggtcacccaagaatacgttgaggtgatctctgggtcttccactcctgagtcctctcttctgtgatcgatatactttactactctcagtaacaaggattctcacctcttcatgaagcagccattccatttttggatattactaagtagtctaaaaatcttcctttcactacaactgaagtcccttttttgaaacactctttttattttattttgttcctttttttattatactttaagttctgggatacatgtgcagaacgtgcagtttttttacataggtatacatgtgccatggtggtttgctgcacccatcaacccatcacttacattaggtatttctcctaatgctgtcccttccctagacccccaccccctaacaggcccagtgtgtgatgttcccctccctgtgtccatgtgttctcatttttcaactcccacttatgagtgagaacatgtggtatttggttttctgttcttgtaaacactcttttttaattgtgataaaatacacataacataacatttaccattttagcttttttttttttttttttttgagagaaggcctggctcttttgcccaagctgaagtgcagtgatgcaatctcagctcactgcaactcctgctccctgggctcaagccatcctgccaacctcagcctcttaagtagctgggaccacaggcatgtaccatcacacccggctaatttttgtattttttgtagacatggattttcaccatgttgtccaggctggtctcgaacttgtgagctcaaacagtctgcccacctcggcctcccaacgtgctgggattacaggcgtgagtcatcacacctggcctcattttagccatttttatgtgtataatacggtggcataaagcacattcacattgctgtgcaaccatagccatcatccatcttcagaatctttcttttggccttggttcaggctttgggagctatacaggatttattcactaaaaaaaaaaaaaaaaaaaccttcactaggtgcttatcatgccatggatcctagagatgtccagaacaggtcaagctaaaacccttctctacaatagaccttcagttattcaaagacaactatcaggttttccactgaaatgttgtcagtcattctcaggataaacatcactagtttcattaaccagttctcacctattgtggttttaagttccttgctgagttaatccagcagtcattgagagaagtgggggaaggtgggagagggttctgtgttctgaaaggaatgatggcttccagtacttcacaggggtctttgtgaagcaggccatgcccttccaaggagaaagcatgtattgttaatgcagtaactcacatgaatatcagagatagtgacacatatggactatgggtttgtgtagttggcaggattcactggtacatttatggtggtggtggggtgagtgcttttgttagtttcttatcctgtaaaaatgctttgggccaggcacggtggctcacgcctgtaattccagcactgtgggaggccagggcaggtggatcacctgaggtcgggagttcaagaccagcctgaccaacatggggaaaccccatctctcctgaaaattagccaggcatggtggtgcttgcctgtaatcccagctacttgggaggctgagataggagaatcacctaaacccaggaggcagaggttgtggtgagccaagatcgcgccattgtactgcagcctgggcaacaagagcgaaaactccgtctcaaaaaaaaatgctgtgggcccacttcaggtaacatcacatttaccacctcgtcttattcctcaaaatagtcctagattgagtgtgttaagtcacatatctcaaaagcaaagctaaatttatttttgaccataggaacatcttagggtaccactagacaaggaaatcatgattttgacgagtgtcagctgacacaaaatcattgaatgctacagctgggcagggccttaaaaaatcaactattccagtgcttataatttgcaaagaaataactgagattcaaagtgattatataacttgcccaaagttacagaggtagtaagtagccacgctgggacttatcactcagtattttgaatccttgatgagatctgtctattctaaagcaatttcagaggtgctcttgctttgtacctttgggctggtcctttgtagctgagagtaagatgctcctgctgtgtgggtcagaagatttcttcacaagctcagtgggtccttgtgattttttttaacatgtaatcgtccctttatttattgcaaataagcttggcaatttatttagttagcaacttatggtctggaaaatctcattatccaaaccttacattatcaacacatctgtttaaaaagagatgcttaaagaagtggtctaaatatgcagattcctgatcatcttgaagaagggaactactaaaagggcaacctgggagggagtagacaattgtagtgaggccatgaaagccactgacattcacacataagggagtataaaaagggaattcacatttattgagtacctgcatgtgccaggtataatttggtccttaaataagatgaaccaggtttggagtcagacaaaactggatttgtgggggcggtggggaggtgcacagtggctcatgcctgtaatcccagtgctttgggagatagaggtgggcggatcacgaggtcatgagttcgagaccagcctggccaacatagtgaaaaccccgtctctactaaaaataccaaaaaaattagccaggcatggtggcaggtgcctgtaatcccacttctcaggaggctgaggcaggagaatcgcatgaacccaggaggcggaggttgcagtgagctgagactgcaccactgcactccagcctgggcaacagagggagactccatctcaaaaacaaacaaacaaacaacaacaaaaagctggatttgaatcccagttccattgctcactattatgtgatcttggatgtgtttttaacccctttttagcctcagttttctgatccatcaaaaagccattctggggttgttatgatgcttcaataacataattgtgtaaaaatcttggcaaaatgcctataattttgtaagtgttcagtacatggaggagtattattattcttctctcttttaatttttagagcagatcttataaagtttgtggtatcattcagatttttagatacttaaaccaaggatcagaaaactaaaataaatttccatagtcgcaatgttagcaaatactaaaggtaggaatttttcacccagtctatcagattttctattattctttgccattcatttaaacaggaggccttagaggtgggattaggtactgtgggagggagagagagctgtaagaaatgagatggctttttttgttcctcttccaaccttgtcagttctctgctttaggactttccaaggggcaaacatgagaaatacattgggatggaagctgtccatttggagtaaattcaggattgagaaaagcagtcaggatcttccacatcttttcattcacactgtttgttcctaggtggtggagaagaactgtaaagtttcatggggctggtccagaagagcatgaaatgagtacagctcaaaacttttggctcatcataatttatccagggctgcaaaataccctaactcatacctgcatatttacccacatgtacaaacacacacacatgcacatgcacacacatgcacatgaatgcacagacacaaattcttcggccataaacctggacctctctaatttttgctttgctcatctctccttctctagacggggagccatcggctatgtatccccagtgccaaggaaaaggagctcaatctgtgtttgtggaggaacaaatgaaagaatgaatgcaaagcaaaatgaatgggattatttctaaagttaactatagttagaattctggtttattatctgacaaatttgaaggaacttagtacctgctagacatctaaactgcccaccctcacccccaataacaagttaggattttcgtagttggagatgtgcctagagaaaaataatgagaagctcccctaggctggggcctagcctcttgggcctgtagcaactattcctgtaactcagtattagctatagagcggcaagattcagtgttgcttaaagtggacaggtgggcaggcatggaatgaatgaatctggaatagagcgagaagcaggcttatgcatctgaggcaggcatttctaccatctaaaacaatggggtgactttgcagctctccttggtgaaaagagcacttcgtggatgatacccttttgttccccctcactccctttttattcacccctctcctgtcctgcttaccttttctttttcctgtttcctcttctttatcccccctattcttcattatttttttccctgataaaccccacacagtcctttcttcatttctatttatcgtttaagcttgatgcagcaataatgtctattgtttaaagggcttttccctcccagagggatgagattgacccttatttattcagaatgacttgactcagggctgttataaaatgtgggctgcacaaaactgcaaggtggctggtgcctaccagctacctagataagtggtatctggttgaaggggaggacaggcccctaaggcctctttgagcacattgtctaacctggaagtcatctccttttgaaccacaataaatgagaaatggtcttagcaagacaaaacaatgactataaaaccaggtggctaaaatatggctgaggaatgcagaagagtgcactggtatatcaatctctaattggggaaatgatttggctgcagcacaaaggagcccctctctgtctaacattgggtttgccccttgagctttctgcaggcggagattgatggtggtggcgtgatggtcaaggaatgtgtcctcagatgaggctgagcagaattatttctttgtaaattttctttttcccctttcttcctccctcccttcagatatctcactttctcacctttctttcaccttccttcttttcttgcctgtgatcctttcaaaccactttagtttttttcttatgtggagaacatggttgacccattcaatttcttttcactacagagtagcgttcctgggggctttgatgggacaattgatataatgaatcttgactttggtaggactgttattctgtcttcataaaatgctactcaataaaccagtctctagattatagctctgttaggagtgtttatcactgttgaaaagaagccttataaaaattgtcatctgtgggttattgctaacattatagattatgaatctccatttaaaaaaataaacactgatttttataattctaaaattaatatatatttactgtagaaaatttggcacatggaagtttattaattcaacttattctttggccgacattaactgagtacctgaatacaaaacctgtggtggttctacaaaacgcatttcatgataaacaaaaataaatataattgagcataactgtaccaagcagaaatggttattattaacatatctgtatgctttattctattattttgggaatgtgtatatatatatgtgtgtgtgtgtgtgtgtgtctctgtgtgtgtgtgtgtgtattctattcttgaatatatactatttgtgaatacatatattctattctatatatatattatttgggagatatatgtgtatatatataacatgttaatgtaattttataagtaattattctaatttttccagttcctgttttttttcaaaaattatctcgtagttgcataat[450 bp omitted]cactatacccactctagtggaagggactgcaaagtcacaagcaaaggctgtgggtatataattcagaaacaggggaggtgcaactaattatgaacaataaaacagtctactatagtagactacctgatattttgttatcactaatgtccataggttgatccaagaagactagttttttatcctttctgttaacctctaatgtgccccaatattgataaatgccatgagacctttttccaaacacataggcttcagaagacatcagagtcttctccactgcccattttctgtttggtggttctaatgtatcttcccattgatacttcaactcatcatatctctaggagttttatttcttgcttcacagaagtctcttagaccaggtaagaaactagctctgattttaatgcagagaatgcttatgaccattattttagatgggcttaaaacaatgaagcctgagacctaaaagggccagttccagaaaatcattagcttcaaaatctagacatgagagaaaggttagatggtttgaggatggttctacaaaatataatggagggaggccagaaaaggttagtgggataaggttctcagacacttggattctctaggagcagtaaggaatgaatttagttttttgctttttggaaaatttagaattactgaaatttgctcaagtctgggattctttttctacttgaggttttctcagggctttgaagaatatgcactgcatagggttttggtattcaggcttcattatttttggttccattctttgtaacacctggggtcctggttctctgctgatgggcctcttaattttgtttattttgtgtctgaacctcagattttagtttgtatttattttttgaaataataatctggttactgaattagacaccaagctcatggaaagcttggaccatgcctgctgcactattttctgcctcatgcctgggatatagaacgtgctcaacacattgttgttgacggtgataggttcagggcacaggtatcctgtatcctcagtctttgcatccaaaacttgacaaatccttttctcacccatatattctccctctcatgcaaaccttcttactttagacttatattttgtgtttaacagtcaaacatttcctctaggatgcctagtctatgtagccatttcaaagataattttctaaggaagaaatgcgaccatccaagcaaagtgtactaatgtcaaggaatcagtgagtgctagaaaagccaattcagagtggtcagaggtaacaaggagactaactaaattgattagctttaataacttgtattgtctcccagagagaaaatattcctggccagaattttgtcaggagcttgttgctctaagtcaactatattgcatgaggactcagagagtaagtgtgcaggaaaggagaaatttatttgggaagattttgtagtggaagggatactatgtaaggctaatattacagaatgttagcagaaagccatctgttaccactgtggtttactaccattcagagagtatttattgagaccgtattatatgacatgcactatgataagaagaaggggtacaaaggctagccttcaaggagctcaaggtcaccctaagaataacaggtggctgcctccaggaagatggattgaacatgaagtctattgaacaaagaccctgctcttactgttgcatgaatgaccttgtttaagatgcaagattgactgtagatggcagaggagggggaaagagaataggcctaaatctcagtcagaatagaacttcaatttctccactctcgaatgcagtgagcatagtaagacttttctctactgaggcaaagaaactttggctacagttgaatcagggatttagtgtgaaaaacatgtaggtttaaaagagccaaacacacgtatctgcatctgaaacacacacacacacacacacacacacacacacacacacacacacacacccttttcatcttactaattcctatatttcccattacttgagagataacataatgaattttggatgcaagatgaaaagaaagtcattttatccaaagggatgttatttcaaagacatacatagatgagcactcctgcatatcatgctattcttcacaatgtcattttaaatgatatttactcaaatattagttagtgatgactaactgccagataccatgctagtccttgagaggtacaatggtgggcaaaatgtgatgcatctttggcctcatggagtttatagtctagtgacaggagaaagacatttaccaagtaatcaacaactaaacatgcaatttcaaacttttgaacttgagaagtatggagagccagccctagttgaggggtgatcagggaaacagctccagagggaatgatgcttgacttgacatttgaagaataagaaggtgttaccagacaaagatggatgcagtcttctaggcagaaggttgttacaaagcccaataggtaaaaagaagtatggcaagttagagttcaaggaacagagggtaagtcaggttggagcacagaaggtggaagtggggaggagagggaagaggagacagggcttggtcatgtcatcacctactggtagagtatgatactgatttagaatttatcctaaaagtaatggcagacccttgaacagctataagcaggagaataacatgaccagatttgcttttttaaaggtcatcttggctgtaggacagtgagtggattggagaagcataagaatagatgttaaaatactagttctccaggaaagagttgacagtggactaaatttggactagggcattgaccagggatgtgaagggaagtcggtgaatttgagatatttatagaagatcctatatttgtagcacttgagatgtcaaagaaaaacaaatcaggacttagtaagaagagatttttattcaaaacaattcttgtaagagaaagaaaaggacaattgcaaaacggagaatgctataacaataaagtttgcaaacatctcaatatcaaacagaaacaaaaatgtttttctttcatagggtaaaggaggaggctagcagagataagcagaatctttggggtgggaggaagctggacaaacaaggggaaataacccctggagtctgacaggacagagggtcttgctgtcaccagctgattcccaggagaagctggtaagcaggtacatgttccccttttatgtgtgtgctcagactttgggacaagcagtgttcaggaacctgtagaaatgactgaagtttggttaaggcaaaacagaaggatgagcaattgtgaacactaggttagagaatgtaattcaccatgacctaaaagatgacttcaaagggatcaagcaggagaggtagaatcttctcagtggatcagtcaattcttatcctcttctctctaggggacagttgatatctttaattcatattaggggtttgttttaggggtttcaaagtcttctcacatccttgagttcatttaccttcacaaattcagagaagtctgttagaattgaaagacctaagttagaagtcagttttctagtcttgttattttacatatgaggaaaacacagtctagagagggaaatgtatctaagacatccccattagatggaaaactgtgaccagcacccaggacttccaacatccagtctgggaatgattcctcctttatatggccgtttcctatctgagaattctcatgacattctcatgacacttcagtgtagcactgtagattcctcccatggagcaaactaaggtgctttccacccaccctatcccctatacagctacacacatagatatttactacacacatacacatagatccatgtatcttattctgaaagctgccagatgtcaatttgaaatttaatttaattggttccttgagttttcggttccccatcatcctgctccacctttcgcttagcgtggccatcctggagttcaagatgtagttaaaaggcaagatggtgtgatggatagactgtaggttttggtggcaggcagaattggtttgaaagcctaatagctacatcatcgaagtgaaattatttaagttttctgagccttatatttttttcactcatagggctggataattgtaattgtctcacttgattcttgcaactattaggtgagggtataataatattagccaccattttattgggcatgtactatgtgccagacattgcacaacatgcttaaaggacattgccccatttaatccttatgccataacctgatgaggtgggtaatattaaccctactttaaaatgcttaagagttcccaactctaatagtaataaggactattattcccacaatcatttatttacacttttattcattcacttattattatgaagtgcctattctgtttcaggcattcttctgggtactagggatacagagaataaaaaactgacaaagcttcttgcccccatgcaactaacaatctagtgaggagaaataaaaaataagcagaatacagtaaaatatatgtagcttattagataaatgttcaggacaaaaataaaatagagcaaggggatggagaagagccaggatattgctgtgtgtagtgtagggaggtcatggatgtgaccatcgattgaaaatatattttatcatttcagaaaagacttcctggtagattacatgaactgttaagttaatttgctttttgggaaaatttagcacttggtatatcctctcattcttccctttccccttcctccttcccttcctctcttaatgcctcacacatttgtgatattggctgtgttagttgctgagaatgtaaagaggaatgtttcttttatctgcttgtctacctaccgttcttcctacttaatcccctatttgttccacaaaggattaagacacatacaaacaaataggaatggtccagccttctaattcctctgctcgggctgtgcccatctgctgggggtgatttgggatttggaagctgaactgtcctattggtacccaaaggtaccagtaggggtccaaacacagttcccaagtgcactataggaaatccggatagagttggccctaaggcaccttaccctgcaccccaagatgaacactaaaaatctgttcagctcattaaggggcctcccagcagggtggctccagtctgtgatctttgcagagcaaagtgatgggtgccctcattactgatgtagtaggctcttgacccgtgagctgcagctgcacacagacagctctgctgcccaacacactctcatcccagtcctcaggtggaggagggatagagtttactgggaaatggcaaaaaagggggggaggggtagaaatgggaacattttcaaattaatttcagaaatccagtcttagctctaaacgacagctgtgagtttaatcactgaaactctctttctattcaagagcagcatgtgtctcctgaggagggggagcattatcaagcagttaagtcgttggaagctgcttaggggctggtaggcagtctgcagggaaggggaggatggcttcgcttttggcagtgacctgggtatagtaggtactgcttacctgctatcatctcatgctatctccagcagtccctgaggattgctctgctctgtctatcactgcgcggggtgggaggtaacatcttgtacaacggaagccaatggggccaagaaaacccatgcctcagcatcgggctaaaaaagttaatggatttcttgattttaagggttggggattcaggagggaattttcctttccatctgttaccaccacagcagtaacagcaactgcaactacaacacactccaccaactacaagagctaatgcttatggagcacttcctaactccctaaacattcacgtcttcgttcatttatgatttactgagcatcgactatgtgccatacattgtgctaagcactgggaatagagcaggagctaaggcaggtatcatccttccccttaaggagccagcagtttagtggaaaagactaaatgggcatctgatgaactcaaacctggtccccaaagatgtcagctcacccgttcgaggaatgagtctcagccttggtccgtcacttccagcctaggtgggggaatgtcagctgatatgaaagctttaccctcccctcccatttacctctcagaccccaccctcaggacagtggtatctgtccgtggctcccatctgtgtgttgctgcccatcacttcagaggaaccagaagcacctgccagagagctttatgtcatcagccatgggaacttcttccatgctgtttgttgcactggcctattttagggaaaactctacgcatgaagagggaagctgaaaagacacagggcaaaaagaaatattccccaccccattctttttccccactatgattttcttcttctttgtcttttgttttatctattttatgattttgcttttcattttaacactgtggtgaggggtgggggggtgctttaaaaccagagccacaagcaaacaggaattagatcagggaaataagaaggcagatggaagaatgatttttgagtaaagcccaggcccagtggaatctgccttgaccatgtggtgctcgtgtgggcccacagaaaaaaacccagaacattgcagtagcaaagtgaaagctctgtggactgtgaatgcagattagaattaaaagatgtgcttaccacactgtctctgtctctgtcccagagcctgcctgtgaacgccaagcctccactctcttccccagatcctattctccgtcataagttctccatcacacattctcacctcttccatttgagtctggattaacacagtagatgctgctcttttttgtcatttttcctctaccatgaccaagaatagtagtttaggcaaataaagatactttcttcctacatatcaagaagttccaagcgaggcagcccagagctggtaacagcccaacaatgccgctatggaatatagtccatattttgctccaccacacatagcatgttggctgcgatcctcaggtttgttaccttatggttacaatatggttcccacacatccaggcatcataacctctttacaggctggaggaagaagaaagcacaaagaactttggttgccctccacagagccttgggtactctttcacagacaactctttatatcttgttttattttttgagacggagtttcattgttgatgcggctggagtaaaatggcgcgatcttggctcactgaaacctccgcctcccgggttcaagcgattctcctgcttcagcctcctgagtagctgggattacaggtgcctgccaccatgcctgggtatttttgtattttttagtagagatggggtttcgctatgttggccaggctgctctcgaacccctgacctcaggtgatccaaagtgttgggattgcaggtgtgagccaccacatccagccatctccttgtatcttatgttcccatcccaaaaccaatcactggaggaagggatacaattaccaggcctggtgtggaccaatcatgcttcatcttctgatcttctgtgggtgtggtaggggcctactttctctcagaacaagggctttctaaccctaccttaacaaaccaggcttctgtggtcagagcagaaggggaagcaatgtagttgataagcaatgagcaatgggtgccacttgcctttgaggtcctccttttgcctaggttgggtgccctggcatctcttaagttgggggtggatgtgagagagttatctctttatgccaatattaataattttgatgttcaaaagaagcccacatgcagtttctgacattatgttccacttttaaactctcagagccctagtctctgaattagaattctagttttagaagtttttctgggcttgcttttctattagaaaccatttggttttgtggccttgtttgaaggcaccattgctcactggttaaactgactccatttgcctgaatgattatcgcctgatgtcttgaggcttacagacccagagaaacctttattcttttctcgtaacagttaataataaagcacttgttcccttgtctccttttttttttctgccacagtatttctcaacctactatctttccatcttttgtcagctagtagtaaaattcttctaaaagacacccaagttcaccactgtcctcactttcaacatatagtagagcactttaatttgcaatttttttcttctcttttcttttcttttttttttttttacacattagccattaaccctgcaccactgccctccacatctttgtcttctacatgaaacttctgtaaaaaatgtctgttaacacctagtgttcttctcctggataatgaggaccaaagaataacccaagttctctttgcatgttggcttgcaggaaacttagagttgaaatacacagctcaatcttataaaatcttatgccctaattatcagtgataattttcttctctgagacagtatcttatatctgaatttatattttttctggttatgacttttttttcttttggttagctctgatattttaatttaatatgttttcagtaaacatataaaatcttttgtcaaataaaacaatgtatttaaaagaaaatagctctgtgcagtgggctttgctgttcttattttacatgttaggatattggggaaactaaaagtcagaggtggccaagatgttttcctattaggtacctactctggctgattggcaaatttcaccctggcatgttaggtagagaaaccttgagaatctgcatccctcactgggatagagatgtagttatcaattagcagtgactgttgtaggtttcatggaaagaggagaagtgtgatatctttcaaggacacaattttcctccagaaaatccaggaatcctcattttatatccatgctgaaggctcctagagtagcattcctcctcttccctccctctccctctttttttgctgtaacaacacgtggggagatatgatggaagcgaagaacgaagtggactcttcagctcaatggaaaggcatcaacacttcatttgatttggaagccaaagaagcaaactatgaaaacctcaccagcattgcaagggagtgatagaaatatataactcacaaatcattatagcttctcaacgtctcagtttttaaatttttactgtgtatttttttgttttgaatcactttattgaggtatgactggcatacaaaaagcagaacctatttaatgcatacaacttgatgagtttgagaaaagtacgtactcatgaaaagcatatgttcatgaaagcatcaccacatatctatcacgtcccacccttttatttattattatttttgcaataagaacacttaagatatactctcttagcatatttctaagtatactgtacggtattgttaaccaaaggccactatcgtgtacagtggatctctaggacttattcatcttgtataaccaaaacttggtacccttggactcagctttttttctgaatgataggttagatgctaatttgcctgcggtgcctacagaagttatcagtgacataggggaagataatcttccccagcctttctcccctgtctagtgttcaaattgtaaaattttcttgaactggactaaatgccttaaaaccctggaatgttggtgtctttgaacccttactttgagctctatggagacctagattgtccctggaggtagtgcagcctcatttcaacaaatcaggttgtcaaaatggctaattgtttcctcgcattactctccctgagaattacctttcttagctggcttcccacggaaactaatggtatttggcaactgtctacttccaaatcttcctctagaatattgcaagaatgtctgaaagcacaacatttttggacaggccaagatgccatgggagaaaacacacacacaagcctacgtgctttctccaaaacttggctctgaagacagtcatatggcagtcacaccacaatccaatgaattgttttacctcaggttttggaagtttcactgctcccaatagcttgcattaagccctaaataataataatgaggaaattctattaagaactatttcagaagctagagaatgtaatgattataaataagaaagggaataagccatatcaattgctgcatgtatattgtataaatagcttgttttgcttaagcattagttaagcaacattaaatttaaagagtgtttctattagccaaaggtatgtagtgtgtgatatagaatgattcttggaactttgaccagattttctgtctgggatgggagaaaatctggccagagtgtgtcttgtaggttgatcacaaattcctaatgttcatcaagagtggaattttgacggtataatgaaagcctattttaactatgtaatactattcttattccattatgtaggtaatgaaagtttgtatgtaaataaaagtttaagcttctctttataataatttatcacaggaactgcctgcaaatagattctaacgataagaatgttcttcttttagctataaatccttagttttctacttcttgcaaataaacagcttagttaaataaactcaagacaccatcattaaacaattcaataattaaggtctaatactccttttattattaatcataatcacttttttatttgaattgagctttacttagtttattgcctctattattgtctgagaggagcactcttatattgtctgctttatgcaggcaagtgtggttttaagatgagcttgggtcaaacatcaaagcaaaaaagatttgactataaatcctagcttcctcattaaccagcttggtcacctatcacaaatgattatagcctctcaaagcctcagtttttatttttttgaaaaatatgtaagatactactttatctactttgttcatagtagttattgctgacatgggacaagatgatctttatgctctatttggtgtttgaattatagaatgcttcatgaattggattaattaatgtaaagtttttgaatgttggtgtttgtttaatcagtattctataatactgccaatctcttactccttgctatccacatatcttcctgggtgatctctttcgcttgcacagagtcaacttttgtctgcctggataactccaaattctattccttttgtgcagaatttcccatgagcattaggcacacatagctcattgcttgcctgacatttctaactggatatttcataatcaactctaaatctacatgcccaaaagataactcttatcacatatcagggtatcaaaactagatatctgggagccatccttagctgaacatagtttcttaagaccaaggcacaaaatatttgtgtagaggagacatggggcaaaggagagaagaaaagcaagaacgaggttgtaaagaaccttgtatgccgagtaggaaatgttcatctttattccgaaggcaatggagggatccttcattgaaagccttctgagcaagggtgtaacatggtcagatttaagtcttattaagattgttctaggatcatctaggggatacagtgaagagaactttactgaattcaggcaaggcaaagagaaagctattgcagtcaacctagcattcaaagagaacactccattgtggacaataaaatcctggttgtttaggtctaaactttggccttggaagggctttttatataatctagtaaattttcctttaccaacaaagtaacagatactccagaagtttttaagcttgcccaaagtgactcagctggcagatggcaagtaccaggctgatatcctgcaggttttttgtttgtttgtttgaaatggaggagtctcactctgccacctaggctggagtgcagtgacgcgatctcagttcactgcagcctccgcctcccgggttcaaggaattctcctgcctgtctcctgagtagctgggattacagcatacctggctattttttgtgtttctagtagaggcggggtttcgccatgttggccaggctggtcttgaattcctgacctaaggcgatccacccgcctcggccttccaaagtgctgggattacaggtgtgagccatgtctcccggcctgatatcctgcagttttgagatacagttttgtgtgtttgccttggagaaaaagagaatttcagttgcccacgattcatacatttttatgtggcagcttccttgaaagggaacaaacgttgaagggattcatttggcaacattattcccattttatagatgtgggtttttaggcttgaggaggttgtgacttttctaaagtcatgtaattaattagtggcgaaggtgttatttaatgacagcatctctcaatatccacttccacacctttttttaatgacgctgcactaaggcaagtgcctcctctgggatagtttctgctctgttcactgctataactgcacagaggcctgcagtttgaatgaagatacacacagagataactgaagtttcaactaggaaagggcaactggggcatgtaggggcaagtgtcaactaggaaagggcaactgggtcaccttaccatgatgacttcttcatggtttcagcctggacagcaaccttgcagagtcagaatcctgatcagcagttttgaccagcacatcaagagtggctttacctcccaggcattgatccagcattagtcaagctacaagacactgatgtagaaaaccataatgtcagtttactaatgtagaataagaaataaaatctcagaagacctgagctctcctgtcagcatgacttgcacttgtacttttcctttttgtagagaagctaaattataatcagaaagttgttttggtgagcttggaatcagaaaataggagtttaagtcatctgttcaacatgcagctttcctcagctgtgatagctttttcctgctgtccagtcttcatgtggagcctggtcaatagcaccagaattctaagtctgctggccaaggtgctgcctcctgcagagagagaaagcccatcaaagttgacttcagtgactcccccttcactcacccctcatcttccacggccaaccaactccctttttgattgacacatcatttctttacatacattaatgccttccatattaccacagagagtttgttagactggaaatcattttatttctttgatctacttcatctttctctgcattgagcctttgcgtactaatttatagctattttctcacaggatagtctatttccattatatctatattttctagtggtcctttgcgtttgcctcttttccagactgtatagggcatggtgccaggcacagtttatttgttttattctatatgctgatagtatcatcttttccatctttagatgttttatctcattcagagtgagaggggcacttggtcagtcctttttgcatctcaatagttgatcctcttttgattaaaaaatatttaatttctaataatgtgtgttagagtgaaaataacaggaattattaggcccagtcaagactaacagttcttgactcatagttccaaatcacagttccaagatttccttaacctttctgatcctcacttccctcccaaaaaagtaagaatggctataattacctacctcatggaaattataaggcttcagcaagattaaatgtactcatttatttaacatgcatagtaagaactataaatgttaatttattcttacttacattaggatactgacttatgaaacagagattaaacacattctgcaaaaggactggtattgacaggctttgattctaatagctcaaaagataggccatggcttgctagagaaaatgaaaggatactcaaggctcattagattaaaaggctgctaatgttctctaagctgtaagtagatttttgcccacatttatgaaggttgatttctaatcagattagaaatggcataggctggtggcgtcatctcagagctgccacagcattctcaggagactcagccatatcatgttgggttgctctaagaacacacagagacctttatgctttttcacaaaagcatactctttccctggagtgtgtaactctatgtgttgacctttagtgggataagttcttacaatggagctattctgggtacaaaacatcactactctgtgagatttaggaagataacactgtttgctgattttacaagcccactcgagtgtcttgatgtgtcaaaatgggagtccctgaacacggaggaaattcacaacatcctaagcaattgtaacagatgaccttatctaatgagaactggggaagtcctctccttttagggaaagtgaaaaatgtgaactaaataggactttctgtaggagagatgcctaaccacccatgggcatgctcacttctacttgtgcagagagtttgcacaaccccatctcatttggtcctcacatcttctttgtattcattcactcagctaggaaggggaatggaagaacacattctccaagagtagtgcctttgcaacatatttttcaagtaaagtgttgacacaatttttgttaagactatgatgaaaagacaattgagaaagaattgtgaaagccagatcttgacatatgcataaaagtacatggatgcctggctctgggctgattaatgatctgtggttgttaaaatctagttatgcctccacttgggaggagtaggtaagctcccagggcaggtatgaacctcaccattttagagaggaagaaatctcagtgtcaggatgttaagttagttgccaagacctcaaaactcataaatagcagagccaggaccagggttgaaagtctggtgtttcacattctgccacacctctctggccagtgttgttcgtgaacttcgggactaagactccagctcaaatcctatgcggatgtaggtcaatttcttaacctctctaagcctcagttttctcatccttgatgtggggatcataaatttacttcttacgaagatgaaatgaaataatatatgtaagcagtgtgttcaataattgttagttcctttgcccttcctattttctcaccaaggaaatcaggtgcaataagctttagtgatctgctaaggctagataactggtaaatagtgaaagaagagtgaggagtcaacagatgattctgcttcttatttcacgtgctttagtggtatttacagagccctggtgcaagagtttctctttgtacttagagaagttgattttctttttcctaatttcttcttatttgaactaagaaccctctacttctctccatcccatctgtattttttctgatgagttctgtagaatatgatattgcattcaagcttcatcatacttttggtagcgcctttgcttgctacatgataactgtcattttagctgcaatttttcaaaaatctcctaaaacactcttctcacacaatcggcctctcttaactaacttgtagacaattttgcccttctgctcaagatcttttctgcctcctttagatttcctccctatccatttctgtctcttctccctatgccttgatctaaagcttttgtgcattatgggactttctccgaatccattttgtagtcattcactcatgtaggataaatgcattttttaaagcactttcattttcattttacatgaaagagaacacttgggtactggtgaaatgcttaggtcagcaatccttttgggaagatacacatgaggggtattatgtatctcgtctttccctctttcaacattttctaattcaattctatataataaatatttactgagtatctactctctgctgggtattgtgctaggttcaggggatatataactgaatcagacagaacccctttctttacagagcatatatgatgatgtcatctcaaggggagcccaggatttcaggtcacctatgtataaagtgagaaataaaggctggctaggagtcagccatgggaaggggatagaataagttgaacattcatggtaaagagaatactgtattcaagatcctaaagcataatatgttggaaaacagaaaatacagtatggccagaaggcagaactcaaaggagaatgagagccagcggatgcggtaggaaatgtggggaagggtagataaagaagttagggggtttattctcaagacaatgagaaattattgaaagagctaaatgaggaattggtataatatgaaatttaaaaaaattatcctaattgcagtggtcagatgggacaggaggcaggcagcaagtggagaaacagaagacacacagtaaaggagccaacctagactcagtggtaacagagatagcgataagtgaacagatgagaaagatctgggtttagaaatggcaggacatgctgatgattgagctatagaggaagaggaaaagaggggagtcaaatacctgtctatgcactgttcataggagatttaatctagtcaactgttttgagctaaaatgtgaaaatacaaatgccatggccagagcaaccataactattaattagcagcaacccttggcaccttcacccaaagcaatcactatgctgggaatatcagactctgcagtagaaccaaatccaggacatccgtgtacagcctactcacatcacagcatctaactgtgttcacataaaaggcagtgtgaggcataacgacccaactcagaaatgccttttttttctggatgttcttttcctcacaaaacatcaaataagagagtctggccacattctgatgatttctcttagaaacttagagaaggggagaacaataatttcctaaggaagtgaaccaattgaattgtcagatgggctgagcagtgacttcttcctggctctactgtgggcctcctgatggatggacatgggccctgtggtaaagagatggttctagaaatgcacagaaactatcgattccaagttgacaaatgagaaacaaatccaatctcaccagccaatcgggactcatcattttgccaaaacaatgcccatagattgcctaccactattattaagaaaagcttttatgctcatttcaccttcagtgcccttgatccaaggtctcagatttatcctagtttcattttcagtgaagtattgatttgataaaagaaacgagtcctgctgctgattgcttagacacttgttagtttcacctgcatatgtaaggtggagttggctgtagttcaagcaatagaaagaagaggtactattttaacaacagttttcaaatctgaagctgatgttctggaaaaattagagccatcggtttattttattgtttcatttataatctcagtgtgcatgtatcttaattctttgggaatagagaaatggcttcagagaggctggctgaatggggaggcagaaacatccaactctgtccctctgggcttctatctccctggggttcctttcacttttcctccaactttgtttctttaggccctggagctaatgcaggaattgccaaaaacatacctatgtggcacacaggtcctgcatgttcttgttctagtaagtggtgtgaatgtgctgtctctagaattatcttgtcctgtctcatcaagaaaatcccctgcagatgtgaaaccctcaagcaattttctctatctgaagatcaggctgcattatttatttatagttccttcagcctccaaaagccctggctgaccctcagtctttgagaacagcacctctgtaaacagatgaaagggattccctgtctggaatgtcatggaaggttccatgaatctagcttccgctaataccaaccattctagaggataaagcccaccactgcaaaagtgtgatccagcctcacacactgccttgcaaatattcttcaggccaactgatgggtgaaggccaggtttgagaacagcacctttgtagcccatgaagtttcttgacacatttagcctcaaacacttgcagagcagatatagtcgatatatcctgggttcatgaatgacaaaacttttcttcatgctgaaaggccaatcataggaacctcaagtttggaggaagtcgcaaacgtaggagagtaggtgatcttgttatgcttaatatctagtgtgatgctggaggaaagacagccaaattggaaagttggggtgagataggatgtgtcttttccatatgtttaaaggatagtatgctgacaagatattattaaggctacaataaggcaattgaggaagctgtatgtcaataaggtcttgagatactcagagagattagacaaagcagagtaatattttcacctgcttaccctcctcttcccccaaaccataccaatgaacaacatgggccccagccctaaattcacaatctctgatgtaagagcctgactaagcatactggcattaaacataaggatgtttgtgtaggcaaaaacccccaaacaattattttagttatctcaccatgttttcatgtctgtttatgaagactcaggcttcctaggctctctgagggccagaggtctcagagctcaggaggtaactagcattggcccttcctttagtttctctttgatagcttattacttaaggaccccaggggaacagtttcccagaattctaccatgacaatttcacaatattgaaaatatattaaactgacattaacactgacatgcataattcctaccaaagcggggaggccgttttgtcatgcggcttaggtggaggagagatagtaagagctgttaggctctctgaagcctcttagataaaagaagtccttagctttgactataataccagctatgctcaagcctttttccccccactatattctttacaatttcacagttaatctctgcattatggttctctgtagccagaagacattgcagacagggaattgagaggatgcttgagttaatctgcagggtctaaggtggtaaaggcaattcagctaccctcatagcatccccgatgttccgaagaaaggaagcagagcatatgttttacatggggataaattctctttatagctaattaattacaaattgccccccagtgtggtgatgtgcacttggggatagattaactcaggggaggagtccagctgctaattcttttttttctccctccctgtccctccttgtgctcccctcctccttgctccctatttcttggaggctgtgtctcctatcgctctgtttgtacagctagcgctaatctaaaatcacagttattagatcacattaagctcctcaaagtgggtgaagcatctgtgagtgtctcattaagtcctggacacacatagtcttgccacccctctctaattaagagattcccactcttccagcactgctgactgcttcctaaagaaagtgtgcctgccctggaggggacggaagggggaaggagtgaggtaaagtaagggtgagtcttctccatagaccgtgaccttgcccagcagtgtggcctgctggaggagcagcagtagcacctgggagcttgttagaaatgcaaaatctgagccccatctcagacctattcaattgcattttgtagtttaataagacctccaggtgattcatgtacacggcaaagcatgagaagcactgaaccaggaaatggatagaggagtggatcccaggatgcaaactggcagaatcccagttgttaggagatcacgccacaggcagaattcatctcagcagaaaccgaagtcaccaatggcaagtgttcgtgtatttgtgacattccttgggaattgtgtttgtccttgcacttgcgattttgccttttaaaagagcattttggggccaggcgcggtggctcatgcctgtaatcccagcactttgggaggccccgaggcaggcagatggcttgaggccaggagtttgaaaccagcctgggcaacagggtgaaaccctgtttggtttcatctctactaaaaatacaaagattagctgggtatggtggcacatgcccatagtccagccactcgggaggctgaggcaccagaatcacttgaacccaggaggcggaggttgcagtgagctgagatggcaccactgcccaccagcctgagcacagagtgagattctgtcttttaaaaaagtattttgaaagagtaaaaggagaataataatgtcattggacacatttagaacctatgtatgccaagcattgggagtagaatgcaaggcaaacatggctcttaagaaattcacagggaaggaagattctgaaataatctctctgttcagggctctatggggattcttaaatattgggcttatatgtcttggaagaagagacattaaagtgagattttaagtaagaaaaagtataggcgtgggaagggtgtagcaggcagaagaagcagtgtggatagaggcccagggataggaagagccttgccctcagggctagttcagattggctgcaatgtggggcctgaccagagagagatggtgcttggctgcaagggtgggccagggtcatttcacgcagggggttgtaagcctggtcattaggagctttattctaaggacatcaggaagctgatgaatttttaacagagaattctgagcaggagatgtcaatgaatgtcctgattgtcatccaggtgccagctgcattgactcagcattggcccacgcacactgcaggctgagggtgtggtgtacacactctgctgcttccctggtgacagcattccaccgactctgcccttagatacagtgaccccagatgtcaattcagaaaccacacacccacgttacacagtctgtaagtgaccagccactcaggtgaaacaggagacttgagtgatggcagcaaaatgaattgcctccaaattcaactgaatatgaaaacatggatgggttctcatttcccttcaacaaggaagttccatgtctcaagcactcttttagttactagggatagatacaacagtgagcaaaacagaaaaaaaaaattctgtatttctggagcttacatttggggttagcggctgggtgacttgtatcgatttccatcattatgtccttaatttcacagacgctgaaactgctctggtttttggctatttagagattgcactctcttcctttgtggcttaagctggtgtcacctttacagtaagatatgttacctgaaagagcttttaagaaaattaaatctattttctcctgcccctgtggattagaggaaaacttcctattgcccagtagcattttttttatgctctcagtgaataatgatgataatggcagctgagatttgaatggtaacttgggtctaagtactgcatgtgatacatttagtcagtccccacaaacctgattagaaaggaattacctccagcattttacagaagaggaaatggaagcttagagcagtgggtaacttacccaggttgaaattggcagagctgaggtccaaatcagagaaattcagcatcgatggtgcaatagactctaggaagtggcctcatatatggtctagtcaatagaagaagccagaaaacgcttttcagagaatgagatctagtcttgtcaccttcttcacttaccaccttttcttggcttcccaaggctcaaagaataatatgtaggaactgctaaaagataaactggggcacattcaaattttaaggagtttatttgagcattcagcaattcatgaatcaggcaacatgagacttgggctgttcagagctccatgacaagggtgtgaggggaaaccttataaggtgtttacagaagcacaggaaagaaaatgtttgattggttaaaatggaagtttgtagttcgaggttaggcgttagtttcggattgttaagctcgagttttgcttttctaggctatgactctactctgagttgggttttggtttgcttaggtaggaacccaccacactggagctgactcagcctaatggtctcccagttaattattttaacactatggtggggttacaaggctctgtaccagttggcctccgtttctttgttcagccccagtcctgggtactccccaccccacaccgttctcctcactcccagccacacaggccttctttcagtccttaatatttcccctgtttctttctaccacacaggctttgcacattctcttctcaatgcctaggatatgtcttcttcacatattttctcaaacacaaatgcagatctcagtttcaaggtaatttgctcttggaagcagtccctaacttctctaactacatcaaatcccactcttcagttagttccacctttcaattgcaattaacaaaattgtaattttatatttagtagtgcagtggttttcaaagtgcgactgccacaccagtggcatcagtatcacctggcaacctgttagaagtagaaattttcccactccactctagacctactgaaccagaaactctggaggtgggtggggcccagcaatctgagttttaccaagttgtcctactgattttaatgcactgtgaactcgataaccaccatttcagtatacactttttttttttttttgagacagagtctcactgtgttgccctgtatccacacctttttataatatgcttttggaggttttcccatcaagaggtggaatatatttctctacttatttaaaatacctgactttggacttatgttgtctagtaaaaggcagcaaagttacattgtgccagttccaagcctagatgtcaagaggctctatgctcttccatttactctcatggaatgcccaggctaaagtgaagtggcacgatcatagctcactgtcacccccgggctaaattctcccacctcagacttccaagtagctgggactatgggtgtgcaccaccatgcctggctagtttttgtatttttttttttttttttttagaaatggggtcttgctatgtcgcccagactgttttcaaactcctagcctcaagcaattctcccaccttggcctcccaaagtggtgggattacaggtgtgagccactgagcccagtctagcgcatgcctttaatggatgccattcttccctcataggctgttggttctatcaggacagagactgagttgttgttgattctctcttgatacccttacttgctattcagtacatgttaggtatccaattaatagttgtttagtcaataaatgagtgagcacacttgacttttgtaatgtctttttaaagaggtattattttacagataaaaaacacctgaggctttgggagttctattgactgctaggtgtgagttatgttgggtcttgtgaatttacaagtttcttctttggagaaaatagcaaccgtagcagctctaggtgcaaaacatctttgatgaagagattccattggtatttcatggataggctgaggaaaggtacttagtagcagtcccctaccaacctgaaataaacctgttttgcttccttccttactcaagcatttctcaagtatactatagctgatcttggcattaccaaaatgaatactatcctcagaaagcttaaattatctgtatgtttacctatctgctgtgtgtatgtagatttcctatagatacacatttttctaaaaaatgctaggcaggcagtgacatatgcaagagaataataatcaaattagtaccaaatacttccagttgaaaaacatagattatgtatttacatgatggttttggacatggaaagtatgagagatatttctcacaaggctgcttatagcaagtaaaataccattagggtagtctctttttcattgaattattcatccagagtcattgagggcttccctagacaatgtttatgtattttgtgtggaaagtataatatccaagaaaaaccattttcatattttttaacacttttaaatggttcactagccgggtgcggtggctcatgtctgtaatcctagcactttaggaggctgaggtgggcagatcacctgaggtcaagagtttgagactagcctggtaaacgtggcaaaaccctatctctactaaagatacaaaaattagtcgggcatggtggcatgcacctgtaatcccaactactcaggaggctgaggcaggagaatcacttaaaccagggaggtggaggctgcagtgagccaagatcgtgccactgtacttggctctgtacaagatcagcctgggtgacagagcctgggtggctctgatcgcccaagctcagcctgggtgacagactgggattctgtctcaaaaaaaaaaaaaaaaaaaaggttcactgtaaaatgaaagttttgttgtacttgctttttaaaatcacatattccattctccctcacccttgctccaacttttaaaaattgactttgtttaaaaaacaaaaaacagctgtacttggcagctggtttggaaacagcattgaagaactgaggaatttgcacaattaacagctatacatagatactggttctaggatgaaaatgtttaacggtgtgccaccaactctgttccgtgtaatagactgattaaaatcttatttacatttcttccaagttcttacaaatcctatatttctccttaattttcatttggtgggttattagatttggttgaagggaaagcgaatgctgtttaagtgtttaacaggctgttttctctactcagctgatgactgttatatttcacatttactctgaatttgaaaactagctttgcaatctcagcagaacttgttactctcatctgaatgtgccttgcctccaccttaaaacaaacctgaatcttaagactgatggttcagattttcataacaatgattaaaataggattctgggtggagcacagtgcctcacgcctttaatcctggcactttgggaggccgaggggggcagactgcctgagctcaggaactagagaccagcctaggtaacatggttaaaccccatctctactaaaatacaaaagaaattagccgaatgtggcaatgtgcacctgtagtcccagctactcaggaggctgaggcaggagaattgcttgaacttgggaggcagaggttgcagtgagttgagatcgccactgcactccagcctgggcgacagagagagattccatctcttaaaaaaaaaaaaaggattctgcatgacaaattaattagcaatcatgtacctcccatgtgctaggcagagcccagtgttaggaaaggctaggcctcaggaaaggcatagtgtctgtcttcaaggtatggagtctgtctatgctagtcctcaggaaaggcatggtgtatctgtcttcaaaacactgaaactctgcatttcccaaaggaggatggctaaaggatgagattcacataatgacattgtgaatgcagtgtggtatcctgggtcggctcctgaaacagaaacaagacatgagtggaaaaactgtgaataaaaaatgtgaataaattctggggtttggttaatggtaatatgccattgttaatttcttagttttgacaaatgtaccattgttgtgtaagaggttaatatttggcaaaattgggtgaagggcatatgggagcttacattagattcataacttttagatttgtaacttttctataaacctaaacttccaaaataaaatgtttatttttaaataaaagcactaggattctagtaaagacttactggaaagctcctgggttatttatgggaaataattattttcaggaaagcaccccattcttgccctccctccctgcagccttagaggatgtgtgaagaattaactggtcactgggagaatgaagttatcttttgtggataagggctgtgcaaaatgaacatagccttgtgaagtgggaattagggccacatctggagaattggtacctgctcaccactttataattgtgtggcttcgggtcagttaatgtatctgagcctcaggttttttaatctgtacaatgaacgtattgttttgcttatgcagacaatgggactactctaatagcgaatttaaaataatgttgtaaaagtgctgtaatcactgtgctctaaaaatgtaagaaaggtacttaaaccttccagccatggccaacatgactaatgacagctgagtggtacttctaggtacttcccagacttgagccttcaacaacctgaactccattgctttattgaagatggagagacaaagctttcctatgaaaaaaatggccaaatgtgtgttttatcctcctctggtggatagtccaagcattgcagcctcttattggacttgagcattatctgcaagagcagttccagacagctcttatgtattgcagtcgctctgctccctgcattccaccttcagggcagctccatccgtttttctttcttatggtgcctcaaatggccttacaacaacagcgtactattaaatgtatcattttttgagaatgcgctaatgcttttccccttatacctctagggtttactttgtcattctgtccttttatggtttatttcaacatacttagcataaagcctagagtggtgggatgcaatatcttaccttagctgaattgtggcctggatcatcagtgtccttcgcaaagaagtatagctgtagattctccctggaggaaaaacccatttaatatttagtttcatctcctttcattttgttcttggtgtaccagaaaagcagcaatgctggctcaggaaagagggacttttcagcaattcatttacctccctagttttgaccttcctcagctggatgtaggaaaaaaagatgttctcatcctgacttcacccacaccacaaatgtacatttagtacctcatcctccggaccagatgttaggcactttaggttcaaagggttgctgcccacaagagttactaactgggaagactgaggcaatgcattaaaaaagctcacactctgcctcatgtaatcaatgccatctggtggtatttccgcttgttggtaataggtagtgataacaacaagaatgataacaacgacaaacattaagtcagctctgtgaaccagcctctaaccaggtgcattatatacgatatctcttttgatatgtccaacaatactagaaggtaatactctttaagatatttttgcaaatgaggacactggggcttgatgaagttaaataacttacccagatataaccattgtaagcagaggagtaaatattttgattacataaatatatcgctgagttctgtcattcagtcttttctcatgacttttcctcatttgtgtcacacatcactcatcagtcttggcatatcatttttcctctggagattctgaaattggcctcgcattgcttcttagccctgactctaagcagccatgatttcttgattagggttggcatagaagataaatcctattttccattcagcgaataaatgtttgttgaaagaaaaaaggcaaaaaattcctggctgaggtgtttaaggaaaagcttaacagaaggagtagaaatttgtctcagccttggaagaaaggtgtagggcctggtaagcaaagtttattatgatagtagcttgattattgagtgcttactttctgtcagcttttgactatagccactgtcaatccatttaaagccacagcatttctagatgatatgtcctattagtatgcccactttacagaagagaaacagaagcacagagagttaagtagcttgtgcaaaatcacatagtctgttcaaggcaaagccaggacccagagcctgcagtcttttttttttttttttttttttttgagacggagtttcgctcttgttgccctggctggagtgcaacggaacaatcttggctcactgcaacaacctctttctcccaggttctagtgattcttctgcctcagcctcctgagtagctgggactaggcgcccaccaccacacctggctaattttgtatttttagtagagatggggtttctccatgttagtcaggctggttttgaactcccgacctcaggtgatccgcccgcctcggcctcccaaagtgctgggattacaggtgtaagccactgcgccccacctgagcctgtagtcttaatacaccatactattttaagagagcagagatgtctgtttactgatgtattctaagggtctggaacatagtaggtgctttatatatagcgaatgaataaaaataccctctttctttggtaaaataaaagaggaaaggcattctagatggggaaaatagcaaaagcaatgatgaagagataccaatgatttgttagtgataaatggatttttatacagcaagaattgaacatacatttggcaaggcggattggagccagcctaaagagtttagactttttgtttagctctcattatcagaaatcgtcacttcctacctgtccaggtttgcataaaccatggatgctctgttttatggtcccatataatgaagattatgtgtaattacttcatagtggattgcactctagcaaaattaactgtccatatttcttctcatgagccctttgcgttaataaatgatgcatttgaggaggcaaaaatggttgggattttctgtgggggaattcctcatgaggagataggaggaatcatggaaaatacctggttctaacaagatcttgattattgacatctgtttctttggcttttcaaggtagtaattaccaaacagagtagtatagatcaccgtaatgacatatttggaattttctgagcaactcatgtttcatgtaaattgaggtatttcgatgtgtttcatcatattagcaccatagaatgccatatctagaactggggaaaggaaattattcataaaaaacaatcttcatggagaattcagctagagaaaaagacggaaatgaatcaaaattccccgcaatcgctcttttccacccaccattcacaatatgtgtttcttcttgagacctcaatatcctgaaagaaaatcctctgtctcagaaagtggaattaatccaggtaatattttgactggattttgactggtaatatcagctgttgctgataaagtcaagattaatgattccttggctaccagtgggctgagagtgtgaaagtcaaaacctgttagaaaccaggggaattgcccatgaaataagatggctttgtgaatgcgtaggtgactctgatttccagaggggattttgcagtaaatcaatccttctaagatatttagcttgtttaactcaatgacattttcattcataatgcttttatttctcatctcaagcaggagagacagtatcagttctgcacaaaactgagcttgaacttttacttgattgtattttcccatctataaactcttatcagggtgctaaaactgggaataaaacctagcagtttgaaaaaatataatcattttattaatgaaagagtctgtggcttgtggtagagtacacattggggcctcatttgaagaattaacaaggattaaggaagagctgcttttcatgagtgcttctctcaggaatatctgtacgtaaacatattagaaatgagtgctggtgagcactttttggacagcatttgatgtaagccctgggagaaagatgaaaaataacaacctgatggtatttagagtttattcatacatttttgtgtatattgtctcattgtaattctcataatagtttgtatcaagcagggtgttattatcatcattttacagatagggaaattgaggctcagatggattcatttactcaccttgggtcctgcagaggaaaagtgaaagcaagtgtttaaacgttgacactcagatctcttactccaaagaccattctctttattattaaactattgattagcagtgattcacaaaggtctgttttgtctcctacaaatgtgtcattgtgtatgcatgactgaacctgtcttcttaggaaatcacgatgtatcggtggttcctgatttcttttttagcacataacatacctttctgaccctgccacctaatgcaaagtgtactactattcactcattctgttcttgcattttgtagattccaaaagcattcattttcacacctactatgggagacggagttaggtaagggaacggacgagcgtagacttgaatagcagctctttttcttaccagcggggactttgcctctcagaaagctacgcaatctctttgagtctcagtttcctcactcataatatgaaactgagagtagtactgactgtatatttttgtaagaataatgtctgtcatcccctagcccattggaggtgtcaacacatgggggtgagttaaaaagagaagggtaagacagtctccatcatgaatacatacttagtccaaagggcgggggaagaagcaaaagtattgcaatcagtgctgtttcctcagttgaataattaatgtaataatactgtttacccaaaaaggataaaatgggataatgcatggagaacacttagaatcatgcctggcacatagtaagtgctcaataatttttagctctaatcatagtaattagtaagtgctccatcagaggcttgcactggtactatggttgctctgaggcaaaagcttcaatcattgggctaagtcagagaaggcatcacaaaaacagtgccatttgaatttagtcttgaggcatgtggaggagccttccatgctgtccagagttcttcaccctgatggctgatttcataaataagcttaagtgcaatgtgtaggaaaattggagtgaaagttggcaatggcgggagtgctggtatgtgttggagtaagggtggcagggactacaatgtcactgccaacaaatggcaaattttatggaaattaaaatatcctgcaaagtgcggattcaaggcaatgctgtcccctttgctacaggtccactgcattaatcacatcctttattacaagtgtcaacacatgattgggagcaaaattctttgaggcttaactgtaaaggaagaaagggataatggcacaaatgctgacctccattcaaatcttgccttaccactaactagctgcgtgatcttggagtaattgcattgcctttctgaggtttcattccccagatcttcaaaggaagtgacaattatataccttgaaatgttgttgtaagcatttgagataataggcatacagtgtgtggtgttttggtagattctcagaaaaataaaaatactatatataattataaatatgattctaatttattttataaattataatatatttacaattatagctaaataccaagcactgtgttaagagctttataggaactatctcctgtaatgatgacatgattaataatgacacatgatggtgatatgattgacagaaagatatcagcaggcccagatggaggatatagagttcttttaatgacaaggatgcagaaacatacggagattgtatagtacctagttttaaagcagcatgcacctagagagaggtgcagctttctgggtctcccagtgtttccctgggacacacagctggggataataccacctacctggagtaaggattctattgggtgcaagaagctccctttgctgtcacaagggtgatttaatcccttggcatttcttccttcacatctgactgttctgggaatctgttgcaacttagagttgcaaggaatgaatgcgaagacaccctaggacatttctgatagttgactgtgacactaggtgatgagcatgtcagttcctcaggatcattccttgggagaactggctttaggtctgtctaatgttccccactacagagcactcagtaacttacccaagatcacacagccagtacatggaaacattaggatctaaacatgatctaagtgttcctaatgaccatgccatatccagttaagaattgaattgtgcatacaatttacaaactagttaagagtagagggaggaaagccaaacatcaacttccaaagcaacagaagttagatattctataataaagttatcggttgcatgttgccggcagaagtaatgaccaaaggagttagagaagacagatgaccaagggctggaatagctgttgaggaggaagtacattcctggcatgcaaatgattcattgcaggagggcttaccacatctgatataccacgaggcttccttgctttccagctgaaatacaaccacaacttcaccctcactttcctttcccgttaagctgcccacctatcacactccaaaacaacatgtgggaaacataccttaaacagcttttaaacttttcttaattctccccccaccacctcttctggctccatagagaataacaattgctaagcttaaaacatgttacaaaaatgttaagaattcttttctcacgttgccaaagtgactactggcttagaagaaagttggaaataagtggtgaaaagcagcttagcagaggggaaatgcgtggtcatttcctgaatgtaaaaaacacctagggttgggataatgtgaaaaagagacagtgattagatcaggcttccaagagttttcgagaggagtgcaccattagaccttgctcagcgagccaccgtccaaggctccctgatcagtctatttggctaagagacaaatgtgccaacctccccagcctcactcaaggactgaggaatcaatatctgggggcatacttgcaaacaattcataaatcttatgtaaagggatttagacaagatttgctttgctagtgaagggagtgggtagaagaattatttaacctgcagctgggcaggttaactagagagaggaagctaaatgtatgctatggtcacctctgtagaggaagagagcacagaaaattttaccttttcctggattaccttcccttcttgtttgcctggtgtcctttttttgttttgtttgtttgaaatggagtttcactcttgttgcccaggctggagtgcaatggcgcaatcttggctcactgcaacctccacctcctgggttcaagaaattctcctgtgtcagcctcctgagtagctaggattataggtatgcaccactacacccggctaatgttctatttttagtagacatggggtttctccatgttggtcaggctggtctcgaactcttgagctcaggtgatccgcctgcctcggcctcccaaagtgctgggattacaggcatgagccaccgagcccagctgcctggtgtacttttaattattcttgaagatccaaataattgcttctcttggaagctacctttcacaggcagacttcatagcttccatatttgttcttgaatgaactccataggttacaaggatttcctcacaagtctgtttctcctgctagagtcactgagattgtgatactaaacagtgacttactcatctttgtattgctactctctagtagagtgagtttactggttaaagcattttcattaaatgtttgttaagtgaataaatgttgatatatatatatatacacacacacacacatacatatatacatatatatctttatatattctcaccttcccccatccattatttctttggctaaggccacctggattttctctgttttcatctccatatctatagactgcatagacctctcacacaaatttgcattgctagttgaggtgttctttgagcttctcagtggttatgacaaaaaggactttagcagtttgtgactgtgccctggaatccttcagcagactgaaataccttcagctgaaggagatggtgtttatgcagaagcccagcacctagcccatcaagcagtctgaggtttcagttggtgccagagataactccagtgagagaactcggtctaggtttttagaagttcttccccagctaaagatgacatcttaatatataaaggtttaataatcatggatggtcctttgtagacatctattgctgtggaaactctagttctctttaccttgagtagcttcttaaaaagaaaaataaagagaagaactagcagtgggaagggagaaggggtatcaggttgtataagcaaagtgatttctctggcttatgcttctataaatttgtttataaccacaaacctctggtaacagggcatttgcagaaggaaaatatttatagaagtctaccttgccaattacattgcaaaaaataaattgcctttagagtccttaaaaaaattcaaatatgttttccctctccactgccacccccacatcaataatttgcagctcgaggtctatgtctaaaggataagagtttccacaagttgattgtggatatctgaaatcaaatttaattacatgtgatggatcaacttcttgaactcccatatttctttcattgtcttcttcggattccatgcctcacctttgtggaaactgaactatagagaaatgataacatgactcagagccagccctgcaatcaagggggagtcatctaacccaaattggtgagttcaggtcagcagcatatagtgtcttggaaagagcatgggctttgcggtcagatagacctccttgaatttgaaacccagactgttattaattatattgggcagaattcttaaactctcactctcctcatcttttaaaatgaggtttgaaattcatcatggagctagcatgatgatttactagggaacatttctctgggtatcaaggtcctcaacactcagattgcacttgctctccaacagaatttcccagtaattccctatgctagttttcttttgctgcataacaaattactagggacttagctgcttaaaacaacacacattgattacctcaccatttctgtaggtcctaggtccaggcatgaattagttgggttctttgctttaaaactgcacaaagatgcaatcaagcacagggttgtgatctcatctgaggcttgggatcttgttccaagctcacacggttagcaggatttaattccctgaagttgtaagactgaggccctcagcttgtagaagctgctcagttccctgacatgtggcctttccataggtgtttcataatatagcagcttcttcaaagttagtggtaaaggcagtaaagaaatacatttacatttatatttactaatgtaatcacaggaataacatcctatcacctttgccccattgtattggttaaaagcaagtcacaggattcccacccatcctcaagggaggggaatcacatgaaagtgtgaatatcaagaggtgaagaggaccgtgtcaccctagggtctatctaccacactgtcaacgtgcaatacccctggcatgtgtcgcagagcgccctcttgtctgtgtgggttactaattgttacagtgaaattagattcctctttccaaagaagtcagagttgtgaaatgcttgggaaactatgagctgtttccccatcccttactggtgtagacaaaaataactgatacagggcttttatttcctgtgggttcacacttagtctcggaatgctttaaaagacaacacactagacagaagctaacatttggtcagtgtcagaaagtgttataacacctattcaccattcttgaactatattatatcccagtgggctagaagtatgggtttgtctagcaccattttaagcttagtagagagaactcatctcagccttgtccctgggtcccttgaagtacaagtgtccttagtaaggacaatgacaattcatgtggaattaattagtagaaattcccacatataaaatttgtccttcactctatttcttaacaggaaaaatcaaatcaaatacattaacaccaattagatgacaacataatcgaaaacaaatgtgtttaccaaaaaaaaaaaaaaaaaagtacagataggtaactagggaaattgttaacccaacaaagagagactacatgagtctgagtcccttgggaaggataaacatgtttgtaaataaatttatttctctgtcaatatttacttttctttgtgttcctctccatgtgctgagaatttccttctcaggccttcatgattctatgagtgaattactagaaatgctgttagtctcattatttttgtaaaagaacaccttgtgcctgttcttgggctcaatttaagttagagaaaaacaaaattcatgcacatgagagagttcttataagatggaagagacatactattgatctaagacttatttgttttaataggggtccttagtcatgaattatcagtaaaaagcattttatagtaagtgcaattttggcaagaccttgtttctctagttgcataaggaatcactacatgataagaaacaagaaaagtttactggcagaaatagagaaaagatatgtacatctattttatctacctaaacataagtagataaaaatatgtgtaaatagttccttatgtcaggaaactgtgtctgaatatctttctatccttaaaggcccggcacagtgctaagtacatagtacacagtaagcatatagtaaatgtttccatatttcagggacagagtttggacgctaaaatgccaatatttgtttggctatagtgatttaatccaggaaaatagaaattagtttccatgctgtctctggaacttccacaccattctcccagcattttcatctattcaccaaactagaagctctccaaaccccatgttttaaggtttttaaggaggatccattacaaaggcatgattaattaaatcattgtccactggtaattgactcaatctcctccatcttcatctccatctctggaagtctgggggtagggtttaaagttccaaccctctaatcacatggttggtttctttggcagtcagtccccatcctgaagctatctagggtccattaagagttaccttattaggataaactcagattatggttcaaaagggctacttatgaataacaaaagacactctcctccctgtcactcaggaaatttcaaaggattttgaagctcttgtgatagaaaccagggacaaagaccaaatatgtatttcttattatatcacaatatcacaggctgtcgctgtatccaaatttcccccttcctgtaaggaaattaaaataaggccaaccctcatccagtatgaccttgtcgtaacttgattatacctgcaaacatcctatttccaagtaaggtcacatttataggtactgggggctaggacttacacatgtctttttgaaagacacaattcaacccacaacagtaactaattgacttcctttctcctgagctaccctgtgattgaggcagagcaattttctctaaggacatagcactgcaaagatagagcctataatcaaacatcctagttgctctttaggagctcaacctaggtctagcctgctcaatttagtatagttcacttctacgaataatactgaacccaaagcaagactctgacgaggatcgagaaagcagtgacacacctaaccatgctgtaaggcagaatagaagagatataacagagatcaagtgtgtaatctagaaaagggacatattgattatgctgaggaggtaggcatgggaggcagtagccatttgagaggcagaagcagcaggagcaaatgcatagagacaagaaacttccatctattgagtgactggttccacttggctgaagtataaggtaagtttggagggacagggatgccagggtgtggaaacacaggtttttgcttatgagtcttcaatgtctgagaaaaaaaaaaaaggccgcatgggatgttcttgtctatttttgctgttaggtgataaataggcagatatatctaggtatgtgtgtgcgtgttgccaagggatctgtatttatacagatttagtgacaacatttattaacacaacggggtgataggctttggcatcaggatgttgtaatagttgtaatttggcttgtatcaacatccctatttttgcagatgagtaaactgtggctttgaacaataaggacctcacccagggtcgcccagcgctggtaaatgttgggtttaggaactgaacccaggtctagctggttccagagcacacattggtgctttccgtggcgtggcctgtaggtgacttctgagggaattcagctccttggtgctgagggcttagccatgattcctttcagagtgagttctccatgtcttctttggccaggttcctgtgctcagggggattttcaaagataatggtgtccactggagggaaatatatcttggagcaaagatgtgcaaggatggttccagattctccattcctatttatgaaaactggcagatttgctgactgtgaacatagtggccaaagggctgaatagatatgagcatttgagagtaaaatgtgttttgggaagctttaaattcttatttttgaaataagataataaatgtccaaatcaaatgggaaattagtgaccaggttaaaaaataaactgaggttttccaactccaagttcagtgtattttctattttgttaaaaaagtaaaagtaaattgcaaagaagatacttggagaggaggaacaaagtaagtaaggcaaggacatgatggatacagggggattaactggggagggaatgtctgtaaagtgtataaattttggggttggggggggtacagctaaaaggagctgtcctaaatcctggcaaaggccctccactttaataagcgttgtaactttctctttcattgttggaggtaacacgtatgaaaggaaagcagcaatcagaacaatgcagtttcccagagggctctttagcagaagtctcctgtggttccatgctgttgttaatgctccccttattttagtctcctggactccctaaatgctttggaccacttgagcaaggccacgttgctaattgtgcagaaccccttcagaggtggcaccgctgagcaagaccaggcaactcaggctctaatgggccttgattgtggtctctggagcaaaaaccacctcttgaaagctgctgtgagacagctattgggaggtttggtaggaagatttagtgctgctctttgaaggatcgatgtctaagctcttcaaaacctcctgacacctcagatggattctaggtggttccccagtgggcacaatctcattatcatccacatacatttatttatctcctaataggggcccatcactgtattatgagggccgcaaagcctagctatggggctaaaacaagcacacatgaagcaatgaatgagtattaactgctgagatgtatatttctgatggcctcttcaaggtgcagagaaagaagatctcctccaagagaattaaatggtcagaattggggaggtaaaaattagaatctgaagaaactaaacatgctttagagagacaggtggttggcatcagaatgaattcctggcaatagggagcaacctgcagacagggaataagaatgtacacagaatggcctgagtagaatagaaaatgtgtgtctcttttgattataacaaggaagaagtcaagtttgtttttagtttgtctgtaacacccactcattcttaccaatttgccttatttgcaaagagacagctgtgcccaggcctttagaaaggaacagtatctaccgtaatttattggtattttattttcattctacagattgagtattccttatctaaaatgcctgggaccagaagtgtttcagattttggatttttttgggtctggggatatttacatgtacataataaaatatcttggagatgggacccaagtctaaacatgaaattcattatgtgtcatatataccttatatacatagctggaaggtaattttatacaatattttaattaattctgaatacctgtcacatgaggtcaggtatgaaattttccacttgtggcatcatgtcagtgctcaaaaagttttgaattttgtagcactttggacttcagagtttcaaattaaggatgctcaacctgtatttatttttacggttaacttctataggcaagtgacactggtttcaatgaaaatgtatgtaaatgaaaagaagtgaagcaatttaaggaaaaagacgaaataataattcaggtagtatatagatggggcaaaaatatgtgatattgacgcaccattgaccaaagtttgggaaaaagaggagtcatagtaaaatgttgatccttgtgttgaagtttctgatcctccttgcactactcaccatagatactccagaaaagtggaagaatgagtcaataaataaatcattcatgacttttccaaaggaaataatccaactatctgctaataagtgtcaaaactagggtaatgacaatgataaaaaggaatcaatccaggtgacacttgagagtaagaaataacaaataacagatcagagttaggtcaatgtttcttaaactttaatatgcacacaaatcatctggggattttattaaaatgcagattctgattcactaggtctggggtggggcctgggattctgcatttctagcaagctcccagggaattccagtgctgctagtcagtgaaccacatgttgagttgtaaaagttctgggtggtatcagagaggggcagaatcacagtgaactgtaaagttttgtgctactttaaaattttgttgaaaatgcaattttaaataagaaattaaaaacaaacttctacccctaaacattctaactcggaggaagttcttttccctgtaaactttagtaatgtccttcaattctataatctcttgttttatttctgtaattcatttttagttacgttttgttcttgattctcataagcataaagtcccgattggctcataataaactctgagtagacgaggcctgtgaaatactctaaaatcatgatttcattaacacgggttgtttgcacttgaggatgaagttgcccaatgttacactgtaatgggcaaaactgctttgcaaactcaagttctctaattctggatgcttttgtgtgatgacttattgctattcccatgtctctataccaatgacaaaacctttcaaccctctgagtttttcccctagctcctgggactatgggtgggagagtctgagggtcatctattgatattgaatgtggcaggagtgagattcctactcctccccttcccttgcccttcttttccaagggcataagaaggaaagcatggagtgtcagccaggctgcatggagctgcctaccagccagaacctgctaattcttattttatggaagtacctgtcatgtttggccaaatctcctacagaaggataaaggaaccaacacagaattcagctcccacactcccctgcagttataaaacttacttagctttatttaatttttaattttttttttaagtttagaagcttcagttgagaactgcaaattaagttgcgttcaatagtcttttccagctcatatgctgctgctaggttgcaattattgctcgacacccttcctcagtgttttgacatcttcgccagcctgagaaactaaaacacaattatttattaattttaggtgagttttcttcaattttaataattcctatactttatttacttatttgtttgtttgtttgtttctttattttgagatggagtctcactctgtcaccaggttggagtgcagtggcgcgatcttggctcactgcaacctccgcctcccgggttcaagcgattctcctgcctcagcctcccgagtagctgggattacaggcgcccgccaccacacccaactaatttttgtatttttagtagagacggagtttcaccacgttggccaagatggtctccatctctggacctcgtgatcaaccctcctcggcctcccaaagtgctgggattacaggcatgagccaccgcgcccggccacttattttcttatttgcatgctttatacctgctattacttagttcctgtgatgtttcccagaaatatggaattagctgtgccagacactatggccagaagactcaacagtcacatagcgttatgatggttaaatgctaggattgaatgttaaataaattttaaagtaaattttaagtggctgcataataatttattgtgtattcactaataataaatcctaagaatctaatatcccaagataaatgagcccaagaatttattcagactatattctgtaatattctgtgtgaacaaagggaataattggatagtttgaggggtaccatgatttcttacatgttgtacaacttaaatattctaagtgtatcttagatcacatgctacaaatttctattatcactattaatagctatcagatattgaactctattaagcatcatgtactttagtcaatatttgaaaccactcattgaggtggatactattatctccactttttaggtgaggaacctaagagtcaaaaacagaggttaagagcaggtgtggtgccttgcccctataatcccagcacttttagaggctgaggcaggcagatcgcttgaggccaggagttcaagaccagcttgggcaacatagtgagacccttgtctctacaaaaaataaaaatacaaaattagctgagtgtggtagtgcacacctgtagtcccacctacttgggaggctgagacagaaggattgcttgagccaagggtttgaggctacagggagctatgatcatgccactacacgctagcctgggtgacagagtgaaaccctgtctctaaaaaaaaagaataaaaaatagaggttaaataactcatgggtaatgagtggccaagcttagattttaactttttaattctaccatccatgttctcaaccattacactacacccatttaatattatcagtagatttatctgtatctatcctgaaggtatttattttcaacctatatacttcctgcataatgtgatttataatcaatatttttattccacccctaatgggtataatgcactatgctcagttctgttgagaaatgcacagaagtaaaagccatggtgcttgtttaagagctttttacaatcttgttaggggtgtggtgtgtacatatatacaaagtttagtttagtagaaggcctcagcatctatacaagttagtaggataaaagctatcccatactcagaaaaaaatttcaaattagtatcatggttaagagcaacttgtctaacctgtggcccatagggcacatgtggcccaggatggctttgaatgtggcccaacacaaattcataaactccttaaaacatcgaggtttttgtattgttttgttttttgcccatcaactatcattactgttagtatattttatgtgtggcctaagataattcttcttccgatgtgacccagggaagccaaaagattggacacccctggaattttacaggaatgaggtgccattgtgagatagggtggcctgacatattctgctaggtcaataagtatctctgatgtggaaaataactaattgtgggttatatcataaactattctctttttaatttgaagacatgttcctttctttaggtatttctcaatttgttaaacaaggccatgtttgatatctgtattttaaaatactctactccccttttatccaagatttcactttcctcagtttcagttatctgaggtaattcctgtatgaaactattaaatggaacattccagaaataaacaacttataagttttaaattgcatctccttctgagtagcaggatgaaatcttgtgccatcctactctgtcctacccagggtatgaattactttttgtccagctggccagttattagattgtgttaacctttggggattcaccaagaaccaatgttatatatgatccaagagtccacttcagtcacacactcacacccagaatgccagaacttgcaagccactgtgtaaaatatagtctggaaattattttatggaacatagttatatggcattatatgaacagttcttcaagcatgtatacatataatgatagctatattattaaactgtgccaattgcctgccctaccctttccacattttaactctgattcctaaactgttagtaaattcagaattctgagtagtgttgtgcaatttcaaaggacctgccctttcatcatactgttctgtctctgattaaataccttctttgtgtagatccttatataacatagagacagatataatccttctaaatggtctcgtaattttgtataaacccgagcagataatagtattgggggatataggatttagagaaatttattctgataactatgagaagaaatttataggtcagtgtggcattatattaatcctttttcatcttatcacacatttggctcagaatataaaatgtgtacagacatgagatctgtacattaggtagttatttatttttctttgaataattcctttctaaaacaaaatgttggtcagcagaggtggtaaaaatgctagattgttggtcttgtttgctaggattcatgacctgtttcataaaggactttgctaggatttgtgacatgctccatgaaggacttaacttgatcagacacattaaacttcggaactgaaagaaatatctgagcttgttcaacccagaggttctcaaacttcagtgtacatcagagaccaactggagagtgtattataatatagtttgctgggtcccatcctaagagtttctgattcagtaggttggggtagggaataagaatgcatttttagcatgttgtcagatgatgctgatgttgctggtctcagagccctactttgaaaaccactggtctattgtaaggctttctttttacctatgagaaaactgaggacatgagggaggccattcatgtacatatattattcaaatcctgttcctttccatccaaaagccctcatgtggtatcctgttgaagtttgaataaaatcccaaatccttattatctagaagatcttgcatgcctgttctctgcccatccttccatatcagagtctccatagagccttacttactttcactgcagttattcaatggacacattcttatttcagcatgaaaaacaactaatatgggcacatggcacagaacaaaagtgaaggtttgacttacagagaatttcaattccatttttcaattcctgccattttcttgggggctccaaatacagctaatataagtcgcatgctgagtgacttgtcagtctatattcccatgtggtgggtccatcttgattcctctgttttatctatcagagagtttgatcctcattataataatagctattcataacatgtattcatcagccatgtactagctactgtgtcaaacagtactgagatttagatgctgacttctgaggctagactctttattcttagaaaataaacaacactgcccctctattatatactgaaataatagtgatgtttgtctaaacaaccctagctggtcaaacaatggcaaccccttcccctggctgctgttttactcaccatttaacaaaaaattaggtggtgcctttggaggaagagaagggagatttaggcggaaggatttttttttaaaaatttatttttgagacagagtctcgttctgtcacccaggctggagtgcagtggcaccatctcagctcactgcaacctttgcttcctgggttcaagtgatcctctcaccttagcatcccaagtaactggaactataggtgcatgccaccactccggactaatttttgtagttttagtagagacagggttttgccatgttgtacaggctgatctcaaacccctagcctcaagtgatccgcccacctcagcctcccaaagtgctgggattacaggcatgagccaccacacccagctgaggttgaagggattcttacaaagacatgtgaagagaataaattgaaaataaatatgattacattaaaactaagctcagtactttaagatgtcatgttctctgacttgataactgaagaatttgtgtgagtcatgagaagaaggtaatttgttgtactttatattttcagctatccttgagaatggtttctgcttcttacattctcaatgatagacaagtctgacacatggagtttactttaaacggttaggcaatcccatgggttgtggcccatagggtgataacaatagaatttccttttgtctgaccttaaaaaaggatatcagataaatactgcttccttggtgcagttaattttaggccaaaatacaattattggtcagatgcacaaattatctctttatttcttaaggattagaaaaaattttgaggaatcctactttcttcctaaagcagatctgaaatagaaataattttatacaagctaatttttccagggtttttgtttgtttcttcttaaaaaactattttaccagaaaatatgaatacgttctgaaactttaccataaaaaattctcatttcttcccttcttttccttttcttttctcttttcttttctttctttctttctttctttctttctttctttctttctttctttctttctctctctctttctttctttccttctttctctttctttctttctttctttctttctttctttctttctttctttctttctttctttctttcttttccttctttcttttttctacctcttcttattttctctcattcaagcattaatgacctatcaattctacagatagttaattcacacttacaatgtgcctgtcatatttattttaaatattgaaactcactagaaccaaagtccaaatatggatgctctgtcgtggtgagtccacttgttacaaggaccctggaaaatgaaatcaacttggatagaaaccaacatagacccaattttatatcattaaaccatcttctattctaaagaacaactgtatgtgtattacatataggcttctaatagaatttctgatggacatatcagcaaatttaattcggtattttaaaaaatacatcctaaacaaaaacagatttttctcaggagtgtgagaatgatacagcatcagataataaatttaatataaataatgatattaaagataaaggaacagaagcaaaatcatttcaaaaatgtagaaacatttaatatagtcagcatatttattaaaagtaatctgaacaagcttagattggagtaggacatttttacctcaaaaacaagaagctaccaagaaactacagcaaacatatatttacattagtaacaaagcaagaatgaatactatcattgtttctattgattattgaagtgaaaaaactagccaatggagtaagacaaaacaaaaaacaaaaaaacagaagcaaaaagattggagaggaatctacagtacttttatttgcagaaagtccataagggtttattggcagactattagaattaaaaataatttccacaagtttgttgggtacaaggtaaacatataaatctaattatcctctccctacaattataattaccaattaaaatgtagaactgaaaaaaaattcatatacaatagtgacaaaaatgtaaggaagctaagaataatcgaataaaagattcaagaccattaggggaaaaatgacaaaatattattgaagattataaagtcctgaataagtcatcaacattgaccatatttatgtatgggtagactcaataacatgaagatgccaattttttctaaattcttctataaatccacacatttccactcaaaactccaacagaactgttcatggaatttgacaagctaactctaaaactcatgtatgatcacggggccaaaaatagccaagacaactcttgggggtggggaaaaacccaagagaaaagacttgcccaactagacatcaaggcatgttttatccccaaattaattaagacagtgggacatcgacacaaaataggcacaccagcctgtgggacacaatagagctcagtaactgttccttacagtatggaaaattgatccttgaccaggtagacattgaaaatcattagttaataaacaaactagtcaacctatgatgctggaataatttcttatctatatgggaaaaaatgaaattagacttcattttatatcacccatgaaaataaattaaggatatataaaaatttaaatgtaaaatgcgaaactttaaaatttttataagaaaataatggtgattagctttacgacctatgtatgggaaagatttcttaaaagaagggaaaaaagcatagatcattaaaaaaatattgatatatttgattacaattatttttaaaacttatgttccagaaagatatgataaattaaaagacgagctacagacttggagaaaacattggcaatgcacccagcacacaaaggattggtattctaaattgtataatgaccccctacatgtgatcaagagaaagaaaaataacccaatgaaaaatgagcaaaggatatgaataagcaaatgacagatgccaaaaccaaaatggatagttaacatataacacataaaagcatgtatagccacactagaaccttgagaatacaaattcaaaaagcattgagatattacttcaaaccaccagagtagcaaaaatgtaccattctgacagtattaagtgttggcagggaggagaactaagagctctcatatcttaaagagtgggaatgtgaattgaggcagccactttgaaatacaatttagcattgaagctacacatgacatttggcctcacaattgcatatttatgtaaacacttaagggaaactctcaggcaatttacattgagctagttattagaatgtacactgcttgttatgtgaaaaaaaatctaaatcagaagagtgcatcaataaattgtggtatctctatataatataataacatccaatactggagcagaacaaatgagagctacatgcaacattagtgaacctcacagtcatactcttgagtgaaaaaagcaaattactgaatatgcaaactgatactatttagataaagcttgtaaacatttaaaataatccaaaatatttcatgtgtagtttcatatatattaataatataaaaacatgcatggacatgacgaatgtcccttttagaaagaagaaagtgggactgttacaagaatattgacctatgcctgtaatattttatttcttcaaaaagaatctgaaacaaatataccagaatgttaggaattaataaaaaccaggttacaggtatgtagatatttattatattattatttctacttgttcgaatgtttgaagtacttcaaaattaaataaagaaccagcctcactgagatgtgtgtgctgagtgctctactaggtttattcacaaagttcttacactccctgctctcaatgggactgatgaaaatgtatgactcaaccaaattatatatgaccgcatagcatgacattcagcctcattgagaaaatgtcaaaattgtgaatgttaaattctaaaatatcaaggctcaactgtagacatacaaaaccaactagggacataaagaataaaaatgaaaacaaaataaaagctgtttaataatagaattcagaacaatatataatctcttcttccctgctaaaatcaggccagagattggcatttgccttcctgaaggcaatagttagcaggaaaaaccacacaggttcatataatacaaaccaaaacaaaacaaccttctcacacgaagagaaaagaatactttgcaaaatggctgctgcatcttcccaaatacatatttcacctccccaaacagattttccatccttgaccttctcgttggaaacctctccttaagcagttacacacagctctgcaaatgttagagtgacatttggactgggcttgcgtactcagcttgcccgctcttctgggcttccccgggggtctgccaagctccagcacattggtattagccttgcaggcctcacctcccagagctagcaataacatttaccagctacagttttctccattttcaaatatttcctctggcccacatgccagtgatccagctcctccatagagtagaacctgaaaggagtggtttaaagaaaggagagccctcctgtaagaacttttaacatttacctttcattaaagattttacttgtggtttaatcgagctctcccactagaattctggtatgtttgggaaaaattaattactaaaatcttacatctctgggaggcggggtacatctttgatcattcttttgtcagtgaaaactctgaaaaacaacgcctctggttggaaaggaatcaaatctgagcttttgccgaaagctttttgcaatcccaagaaatctggattgaccaggaaattctaaatcataactgtagaaacagtttcacagccttgctatgcctaatatgtgacagggactgggtctaaggaccttcataaagtcaggtgcgttgtctctctcatttgttgtatccccagtgcctgaatgaatggatgaggaatgagttgaatagtctcccaaaagctaatgagtcatgagctaatattatccttatttcaccaatgagaaacctgagactcaactgagagatcaagtgacttgtccagtcacagagctaataagtggcaggcctcatatagaggctgagaacttcattgtgctggtgtaatctgtactagtagagatacatatgtgttcaaatgtcatgataagcactggcaaggagaggtaaacatgaataagaacacagttgagtttcaactcataaatgtaggaggaaacaggaaaagagaggatcaccagtagacaaacaccacattaataaatattgcaagcaagatcactgatggatgctaaaattagtggataaaagtttgaggagaataatatttgcataggctcaaagtattttctctaatacatgtatcaactacaaaggaaaatacaatcatttagaagtagagagacctggaacttggaagatcctgactttatcaaataagcaggaaattatcaccaggaacaaggcatgggaatatcatgaaccccttgatagaatgcactgaaaaggacacaatatcatttttatggtgttcttgccaaaaacatgtaacttctctccaatcctgaaaaaacactggacaaaaccaaaatgaggatctttgatacaatatctgactagttctctttaaaaagacatgaaagacaacaaaagactgaggaactattgtagactggaagggagcatggcaaaataatagctattgtgatgtaggatcctagaacagaaaggaagagaaaaacatattaatgggaaaatagtaaaatttgaataaggcctgaagtttaaaatattgaatcaatgtatatttgctatgattgataatcataccatggtaatgtaagaggttattagcattagggggagtaaggtgaggggtataagaaactcagtataatttttataacttttctataagtatgtaagtttgaaataaaaaagtttaaaacaattaaaaaatgagcagaaaatacatttgtccttccagtttgcttacagaattgagagagtcaaatatgtaaactaaactaaagtacacacaaaaaacagtcctgtaggcaccgccgataataaatgtatgtaccagatagaaggccatggaaaagggtggtcatcttacctgggaagagagcacaggtagcactcaggataggcttcatagagaagacgatgctcaaagatttcttatttatccaccatctgttttatagagcatctactatggaccaggcactcttctagaacatagctacatcatggtaaacaaaaaagaaaaggtatctgcattcttggagcttacagcctagaagaagtcagataacacatgagaaaaaaaaaaaaaaaaacaacaccaaacaaaattaattagatattttcggtgttgtcatgaaaaataaatgagctgatgtgatagaatatgctcagggagataggggaattggggaatacctttctgagaagatgatagttaagctatttgggctagggcctgaatgggaaagagccagccgtgcaaaatgaacaaggagcaggtaattccataccaaggaaacagggtggctgaatgcccaaatgcaagaacaaattagtatgtttgtgtttaaggaaacaaaagtaagccagcatgctgggctgtaatggacaaggaggcaatagtagatgatgagctgtaaagtaaggtcaccaggtggctctaagtccaaactggcacacttttgagtaaaaggtggtgctattaataattacaccaggacaacagaagtgaaatgagactgtctggccaaacctggacataagatcatcctttagcaaggaaagaaatcacgtaggacttggtgagccagccaaggagtatgaagttattcccagtgcattaggaagcatgggaagttataacaagggtaggaggtgattgttctggctgccatgtggagaacccactattgagagcaaagaatgaatgtaggggggatcattaggagatgatttcggaagtctagttagtagacagaggatgggggctttgactacaggagtagacttgggagaggagagaactggatgacagtagagtcaatgagccttgcgtgttctcagaagatagactgagaacattttagacaaaaggagcagcctgagcaaagtcacaggggcagggcacgttccaggagccaagagtgtattctatggccaaagtgaaaggaacagcaggggcaggccattggcctggagataagaccaggggctcagatcatatgcgatttagaattcaaggctaagtagtaagaactatggtgccattgaaagtgatatgattagattggttttagaaatatgagtctagtccaactataagagaaaaagataaaatgaacagaaaaatacagtgaaaacagagatagcttttgctagttagagaaataaacaagaagacattttgaggatggtacaataatgtgggagatatttttatttttactggaaattgtccacccattcatcagacacacacttgatcatctagtgttttgcaatataattagttgttgactcaaggactgctgaacagtgtcactgagtcataaagacggctccaagaggaaaactttgggcacaaattaatgctatgtaccctctactttctatcttctgctgcagcgctattcttggcccactcatttctaagttttagcaatatttctcaggctggtgtgcctcacatgcaattctggcaagctaaacatggtgacggagccagataacttgttccctgtagactcataaactcatcagctgtgggctggtaatataatttacaatatactttgccagccctataaaacagcttttttcttgcagagaaatggagccctgacaagaagtgtttatgacttaattttagctgtgttcttcgttgttgctgcagtagtagcctgcgtatgatgcatcctagtcatccgccaggcagttacaactttgttgttgttgtttttggcaagctaaggacaacattagactttgcttaatacctaccccacaatcctatttcaatggtggccatagcatgtacctccatgtttatgaataaatgaatcgagacacagttgttggatacctcacagccgtggcttataccttgatgaaactatatgataccatatccttctagataaagttcctgtaaaatgatattgttagaaggcttgagtggaaaaatctgaaatatgctgtttacagtcaaaatgattatcctcctgctgactagttgttctttattcttctccacagtgtactacaataactatttaccattcatatttcaggctaataaggttacttctattcagccattacataatgtgactgtagctaaaattaaagctccacaaggtaggaaatttgttttattcattgctagatcctcaaggtctggaacaatgcctggaacaatagtatgtactcagaaactacatgttgaataaataagctcaactattgacatattaaatctaccctaatgatttgggaactaatactacaaatagtgtagtcatcttccaagaagagcatattctcctgaggttggccagagggttgatgaattgatgtatcagccctgatacattatatagcatccaacagtcattccaataacatgctaagatctgcaaaactgtaactgcatatttgaattcaaatccagggacagttttttaacctaggtaactctagattctactgtacacaaagttagagttgtgagatttctctttattaattctcttttttctcttagccacatccactaaaaaaggtacttttatttcatgtcctgtatgagttgtatgtaacgtctggctctgtcaccattcctttgtgttctcattccatagctaactttccttaagaagtgttgtaatagcatatatttcagtgttcacaaaaaaacacaaaagcaatgttctgactaggtgactcaatagattttatgtgttttatatatacttatgtatatgtacacatatgtatttaatcatctgtttcacaacattgttgattttgtttttcctgattttggaagcaggattccaaataaggacagtaaaaagcaaactttttcatatctctgtaagaagggaaatcaaggctttaaaatattacctcagtttcctcaggtatgaaataaaaggtatgaatgcaggtaaatttcaactttctttctaactctaaatttctatgcaattcagagacagtaatatgacaacttctatggttctttttcgataaagtgacaagaaactgattttactttaatcagtttatcagacttcttaaattttctttgttggcttgacttttctaggaaattcatcctatatcttagacaacataattttggttcacgttgtatttgtgacccagtttgtccttgtaagttgtatgtatagaattgaggtttgttgaactggcacattgtgaaacaactgccaggaagaaagtatattttcttctgccaccctaaaggatttatctctctgatctggcctcagataatatggaagcacccacattctagtgagtacaactgtgtgtggagcagttcagttatctagcccttcaacatagtcatttggaaatcaaaagcgttaaccactagattagataagacaacaaaatcaagagttcagttgaccattaatcatttttccaaaatcagctcaatgacgttgtgtaataatatttagaataaagcaaaggtaataggtataaaaatccattcatttacagatctatacccacagtcaaacatccttcttgatggttcagagctaaagcctttattcaaattttactaaccagttattgtcaatgataatgagagagtaaatgtattctctggaatactgagaaaaagaatatggcagagtgaggcagcaagctttgagcaaaacaagcaagaatatctacagaacagtgctgttcaagatgaaaagcataactggaccatgatatcaggctcaatcactaaacatagcctgcccatgactgttatgagccattcttaccctcaaagaaatataaaagatttaactttggatttttgaatgcaatctctaccatgattgtgaaagtagatccattgtgtagggagtttgagaacagaagaaagcagaacgtcgcccttatttctctatttaatcaaagtagacttcataatgataaggaagactaacaaagaattgtaattaaccctttacaattatgttccactttacagtttgaattgcagagccctttcaaacatattttcttatgcagtttttaaatatggttcaagatttacgtaagggaaaagtaaggtcccacggttgcatgcccgtgagtagtggagctgggacctcctaacaccaaggctctttctactgaccagtgctacctgcaacatggaagtatcctctcatggaagcaatgggccacctctagacctcaaggaaattcaaacacatatgtacatgcatatatatacaacatgtactgagcatggtattatcaggcatggcttggatattttcacattcatacttcagtgttttcctttgtgctggatacattttccttgcaactctggatccatttccaatctttctccacccttcttcattcagttttgcaccttggaatgtgattctatgtggattgccctgacagctcccttgtcttctgtatttcagttgagtttgtcctgtgaaaaatactcatggaagatgaaaggaaaggatgagaatgagatctgggtatttaatttcctggctcttggaaaggcttgtctgttgacctcaaggtctccactcactttatctctttcccttcctctgcactctagcaattggccctcccctagacccattagggaaagtaaaagggtctgctcttaatagacctgaatactgcattacccctagagggcccactatctcttacctataccttttaaatcttacctttattaaactttcatcaaatggcacaattcaaatgggccatctgttttttaatggtttcctgactgattcggtattattattacacttgggaaactgagtcccaacaaggttttaccatgaaataacttgcagacctggaattccacccagatcttctaactccaagcttatatgcttacagagacagcacaccaagcaatgattctgaatgggaggctgacccatatgtgtaatcacagctctgcacaatagagctttcttgaattgactcagagcaattctcagaaacataccactgtcatttataatggtttattttgaaattttataacatgtttgcacaataaagcaatggcaaaagtatctggaagaaaattgaataagattacatctagtctttcactacaccacttggtcttccctgaatcaccggagttagtctaaaaagcaagtctgatcatgtcactttctatctaaaaatgctttctattgactaatatctaaacttcctaactgtgctttttagagtcatctatgtgttcccccatctcaaattttaccatttctttccatatgctctagttaaggggttctcaactgggggtgacttttccccctaaagggcatttggaaatgtctggagatgctttcggttgtcacgaccaaagggagtgccacagatatctagtgggtggaggccagggataccgctagatatcccacaatacacaggatagcctttgcaaccaagagttatctggtcagaatatcagcagtgtcgctcttgacaaactctaatatactccagccacaccaaattcctcctgaaccttgaattttctgcatggtattagattggtgcaaaagtaattgtggtttttgcaattaaaagcaatggcaaaaactgcaattacctttgcacccgcctaataactatcattcaccagattctgtgcttaataaatgatttcatttcatgcacttgtgaaagctgtgcttctacatatgctgtttcctcagccagagtgccttcccactcttctctttgctctttactcttatattcttgaaacatggtttacaggtctccttcttcttaattctcatctatacctttgtatagatgcctaagctgaattctcacattttctttattattcaagtataacagtttacctgtttgagtctacaacacccacttgctatattctgtactaatgacagagaacatgctatttgtgctttcccccaatttcagcacagtgtctgtcacatattagatattagtcattgaatgagagaacaaatattattgcaagcagttgatagagttctgaagaattgtgttatgtttaatttgtataaattaagtcatattttaaaattcagtggtaaaaattgctatttaagaaaagtctctataaactttttggtaaattgaaattctattagaaggtatacatttataaaccagagtttctctattccatttttttctcttttgaatattaaaaatatgaaagagtacatgcctgcttttcttaaagtgataaatatcaatccaaattgttgtcatccctttagagtgctctagattttggggaatgagaagccaatatgaccatatgtaatggcaggactccgttgagaatgtgaagttagttttcaaccttgtccacaagagggaggacatcaccccacatccattttgttgattccctggaaccgttgggtctgtttggagctggagatttatgttgctcctgctgttgcaaaatacagatttagaacctggcaggcattcttgcatagatttgcatgcagtttaagatcagcccagtttgggtggagggaaagcaatctgggcattttagaagctttgtcagaataaaacacacttaagcagtgtgtgatgccagttgctgcatgaatgagcaggagagtgtcttgaaggtacagaaagagaaaagggtgagggatgtgataatttggtggtaatttgcttacaaggttgaccaggagagtgtcttcttttcacaggagatggcttaagggctggtgggagtatagtgctaggaatgaacgtcagcttgatatgctaagagcaaaatgagagcagcaaagtccactttgtgaagttatggagctaattgctcataatactgtatcagtgccagtgggcctccagcattcactagcaatatcacatgaattgcatactctagtacttttgtttacttctttccttttactacctgccagtctggctttgtctttctagactctagaagatgtaaatggtatcacttccttgcaggtgtagccaagaagatcctggttatcattctcttcctacagtccattttccttatagtttttacttttctttttgattaggaccttatcacacctaaaacaacatatgcactggtaagattgaagactttgagctctaagttttagttattttctatctctttggatgttcagatatactaatttgattaaagaaaggaaagtgggaaaatggtagaaaggaagaacagctgcctgctaggggttttctctttcaagttaaacaaaaatgaacatgcaaaccaaataatcattatcccaaagtaagaaaaggggtacaacccaatgtcataagtctcaaaaattaggagcaagacagaattctgaagccaacccaggaggaatggtcaagcatgatgagcctgctagccccacctatgttcctaaagtacagtactatccacttggtaaaaatgctgagaattattactaatatccttatatatgaaaagaaacttagtacatattcttacctgttcccactgaaaactgaagagtagtggaaatggctataggagaaaaaaatatatgtaatagaaacagacaacgggactgagaatcaaaagaaaagtcaccaggagcacatggattcccctccattgccttgggatgttctctttaaccaggcagggtgacttctggaataggacacttaacaaagcttcaggaataagacacagtccagatagctaaatgaagcttacccatagccttgacacagctcttgatgtcttccctccatttcctgaacatattctgccatctctgaagctacagaaaaaaagtgtatagaactcaaaatattacacaattaaaccgtagctaattctaggtggcaagaagtcaacgaaactgtgtctgaacaattaggaactctggacagagatgcctgagtgtaagcaaggtaaaagggaatgacatggcaatacaaatgcaaagcaacagaacaataaagttaaaaaaaggaaaaaaagcttagaaaagtcaaataattcgatctagagaaaaagcaaaagaacagaaaatttcccgtgagctacattctatggctcaatttgcattattgaatgactcaagaaaaattgaattcatgtcacaagaactcaaagaaaaaaaaaaaacaaattatctgaaaggaaaagggagattgtagactaaaggcaaaaaaaaaaaaaaaaaaaaaaaaaaggaaagccaaaacaatgtgatcacataactaatttgaaataattagtaacaacagggggtggaaaagatatggctaaaaattgaaatattgccagagggaaagtgctgaagatatcgcagttaatgctgatgaaaaaaaccagagattaaattaatcacagagaaactgagatataaagagggcagatggtataattagatccctgaaagagaaaacctaagtacttcaacaaagaaattactcaaaggtatcaaactggaaagttttcttaatataaagaactgactctgaagtttgaaagagcatgttaagttgtaagaaaactacacagtatgttcaatgctaagatgtgcattgatcaagtcattggacttcaaggattaaaataatatccttaaggcatataagcaaaatttacagcacttatcacctatgaggtagattgctggcattatacaatctcattacacaaaacaatgtctataaaattgagcataaaatcaagtgggacaagaattatctgcaaccataatgtaactcaaatgtaaacagcaccagcagacattcacaaatacgaacaaactttggtaatataacactaaagagttcttttttaaaaagttgttaccatataataacaatataacacagatgagctctttttaaaaatgttgttaccatacaataacttaacagtacattttaaaataatttaaagagtgtaattggattgtttgtaattcaaaggataaatgcttgaggggatggataccccattctccatgatgtgcttatttcacattgcatgcctgtatcaaaatatctcatgtactccataaatatatacacctatattatttacataatcattaattatgtactcacaaaaataaaaaacaacctgggtaaactaacttatttttaacttgaatctatactccccccaaaaaataaaagacattacaataaaattcaagcatttaaaagaaaataaagttactcagaaatggaaacacttggtgagaacagtgacggcatttaaatatgcaagaaatacatggtacacattataaatatagaacaaagtatacatgtgtcagaggtcccccaaaccaccctcaatctgcatcactctctagaaggactcataggacccagaaatgagaatgtttatgagtatggtttattacagcaaaagttacagagtaaaatcagcaatggaaaaaggcgcatgggggcaaagtctggaggaaaccaggcacaggtttccaagagtcctctcccagttaaatcacaaaggatgttcctaatttctccagcagtgatgtgtggcaacacacatgaagtgttgtcaaccagggaagcaaccctggagtccagggtttttaccggaggtcagtcacataggcatacgatgcttacatgactgacttagttaccgaggctccagaccccagagggaaagcaagtgttcatcataaattatattcttagcatgaactatctagaccaactggtacagtctgactcaaggccctaggcttgcaaaaacactcttaccactcagaaattccatgagctcaatacacaggagctggtgaagggccagtcgtgcaaataggcctttcttgggagtgcacagtttgaacaactcagatcttttgagttaaccctttcttacacaatatgtgataaaaatagcaaaaaatcatagatgaaggagaaaatgtcaaagaataatgttctcatttttcataggaataaggcagttttactgggtaaatttgcaggagggagttcaaataataacaccagactgggcatggtggctcaaacccgtaatcacaacactttgggaggccgaggcgggtagatcacccgagaggtcaggagtttgagaccagcctgaccaacatgggaaaccccgtctctactaaaaatacaaaaattagccgggtgtggtggcatgtgcctgtagttccagctactcaggaggctgaggctcaagaattgcttgaacctgggagacgaaggttgcagtgagccaagattgcgccactgtactcccacctgggtgacagagcgacagagcaagactctgtttcaaaaaacaaaaaacagaaacaaataataacaccagttgtcttatgtgtttaataatatcttttgtaaattttagtgagttatcttggaaggtagtacctcataaaaagtagttgaaattcggagttttttcttttgctaactttgtgtaatattaaagtttagtttaattaaagtagtacatatagattttcctctaaagagtttgtctattctatttgtgtgtgtgtgtgtgtgtgtgtgtgtgtatataatatatatatgcttagaaaagtacctagaaatatgcctctctactgttaatgatggcatgatttgaaaagcttaatttttttctttatgtatgtctacatctcttatattttaaaatgatgaacatgtactatttaacaaaattaaatctctggctagatgcagtggctcacatctgtaatcccagcactttgggaggccaaggcaggagaatcacttgagtccaggtgttagagaccagccttggcaacatggcaaaaccctgtctttacaaaaacaaacaaacaaacaaacaaacaaaaaaaaaagtagccaggtgtggtggtgctcctgtagtcctagctacttgggaggctgaggtgagagaattatttgagcccaggaattcaaggttaagtgagctatgattgtgccactgcactccagcctgtgtaacagagcaagactctgtctcaaaaaaagaaaaaagttcttaatttgatatttgatttttctttgaaaagggaggaggataatgaaagaccgaggaaatcataactctctgagacaagtttaacacagactgggaagggtggcttttatttttaagggaatttaagcatcgtacagataaaagaaacatacataaaaaagtaaatactatgattttctttctccctggattgctcctttaacacaataattttacagaaacctttttccattgtaagtattattatattgctcaattttccagtgccaatcccttcctttatttggaggagcctctgaatgccagtggggagatagttttcctcttactggtcagaggatggaaatttagagagaagtcattgattattgagattgaaaagcaatcagacaataagtaaacaatcagacagtaaaagcaaaaattggtactaaaatgtgttttaaaatgacacaatgattaaataaaattaattatatcctctagaaatagaaatgggcttactatgacaaatacagatatataccatttgggactaagaaaaattttatgaagaaaggtatgtgaaatatttttaatagccaaaaatagaggaactctggaatgggtgggaaaggagtgagcttagcagaccttctctgtgaaacaatcgtttagctggtgaaaattattaaaacatacacacacaaaagaagctaagacacacacatttaaaaaattgtcataaggacacacagcaaatggaaaaacatttattcaagacatctattaaataccagttagaaaaatgagaggtgtgatatttaaactgtaaccagctgccatccgctagctcacccctgctccttgttttggaagccaaaaggacaagagctttcttacctgccagttatcagtctagggctacagttcaaccccagaagaggcaggctactggtgcctctcattttccccagattcatgttgcagaagcggtattatgggtaggcatagccaagaacattgggctcacttcttttatccagcccccgtttatagggtataagctctataccaattgtggcagaccaataataatgcgtgtccaattgtctcttcctcagcttgcttataaggcagaggttccatgctgggaagggcaagctgaaaaggccagagtccaccatctttcccaaattcccacttatacaatggtagtgtcactcgggtggaagtgggccgctatttgtgcaaccaactgggctgtaatggcacagaaattctgcccagggatagatgcagagtgtcacaataagagtttccactctgcctggagtcactgactatctggaacagaagttagagaagttcatggctaagggttttcttaaacaatggagatcttgatggcaagcagcttatagggagcaggcagctctatgataccagcagcaatgagcaaactggtaaagcagccagaagtcgagtagagagaatcagggaatgagaaagccctgaagagccctctggggatcacacttatccctgagggtatggaaagttgtacatatttgcaaggctacacaactcagaggtaattagagtaagacacagggcagatttgaaagcattctcaagccatacacagatgcctcatccaggaggaagagtcttattggttcagaaggcttaaacgtgatctctcaaccaacactggctgaacaataaggtactcttactcaggtgctattcctaggaaaacaaacttaaaaacaaaatcgttcattcttggtggtctggaagactgtatttattctgaaggctgaaacatctcaagggtgacaggaggataatttctaagctaacagtcctttgctgaacatgaggcaagatcataaacttcctcaaagcagtctccaagtcacacatatacaacagacaaagggcaaaaatctaactgaccaagggggcttaagtacagtatttgatcaataagttacttatattgatacactcacaggaaggcaagccaaaagataaaaacaggggaacctttctgaggggggagacgagagccgtctgccgaaaatatacaagtctcagaattatctctatcaaatcactaaataaatgaacatatgaacaaacaattagaaataaacctagaggaacagggttagtgtccagacttgttacaatgtattatctaaagtccagctttcaataaaaaattaggagaatgcaaataaacaggaaatgtgacccatacacagaaataaatgcaggcaatagaaactgcctttgagtgggctcatatgttggacttaatagacaaagaatacaagtaactattataaatatgttcaaataactaaaggaaattatgcttaaaaattaaaggagaatgagaacaatgattcatcaagtagataataaaataatgaaattttaatacatattgtatatgtctattcatctatcttccaatagaaattttagagttgaaaagtccaaaaacctaaatgaaaaattcactagacgagctcaatggtagattagagttggcagaagataaaataattgtattagtctgttctcatactaccgataaaggcatacccgagactgggtgattggtatgaaaaaagaggtttaatggactcacaattccatgtgactgggatgcctcacaatcatattggaaggtaaaaggcacctcttacatggtggcagacaagagagaaaatgagagccaggcaaaaggggtttcctcctataaaaccatcagattttgtgagacttattcactatgatgagtagagtatgggggaaactgcccccaggattcaattatctcccaccaggtccctcccacagatgcgggaattatgagagctacaactcaagatgagatttgggtagaaacacagctaacccatatcattccatccctgacccctcccaaatcttatgtcctcacatttcaaaaccagtcatgctttcccaacagtcccccaaagtcttaactcatttcagcattaactcaaaagtccacagtccaaagtctcatctgagacaaggcaagtctcttctgcctatgagcctgtaaaatcaaaagcaagttagttacttcctaaatatattcagggtacaggcattgcataaatatagccattccaaaggggagaaattggccaaaacaaaggggctacaggctccattcaagtcccaaatccagtaagtcggtcattaaaccttaaagttccaaaatgatctcctttgactccatatctcacatctgggtaatgctgatgcaagaggtgggttcccatggctttgggcagctccacccctgtgggtttgcagagtacaattcctctcctggcagctttcatgggctggttttgagtttgtatggcttttctaggtgcacagtgcaagctgtcagtggatttaccattctggggtctggaggacagtggccttcttctcacggctccactaggcagtgccccagtggggactctgtgtgggggctcacaccccacatttcccttcggcactgccctagcagaggctctccatgagggctctgcccctggagcccatctctgcctagacatccaggcatttccatacatcctctgaaatctaggtggaggctcccaaacctcagttcttgacttccgtgtacccacatgctcaatatcacatggaagctgccaaggcttggggcttgaaccatctgaagccacggcctgagctctaccttggccccttttagccatagcgtgagtggttgggacacagggcaccaagtccctaggctgcacacagcgaggggtttgggggtgtggctcagccacaaacaaaaccattgtttcctcctagcttctggggcacctgcagttggagaggctgccataaaggtctctgacataccctggaaatatttgcctcattgtcttggcgattaacatttggccccttattacttatgtaaatttatgcagctggcttgaatttctcctcagaaagtgggtttttcttttctatcacattgtcaggctgcaacttttttggacctttgtgttctattttccttttaaaactgaatgcttttaatgacaccgaagttacctcttgaatcctttgctgcttagaaatttcttccaccagttaccctaaatcatctccctcaagttcaaagttcaacaaatctctagggcatggaacaaaatgctgccagtctatttgctaaaacatagctagagtcatctttactccagttcccaaaaagttcttcattccatctgagaccatctcagcctgaatttcattgtcagcattttggtgaaagccattcaacaggtctctaggaagttccaaactttcccatgtttttctgtcttttcctgagccctccaaactgttccaacttctgcctgttacccagttccaaagttgcttccacattttcaggtatctttacagcagtgcctcactcccagtactaatttactgtattagtccattttcatgctgctgataaagatgtaccagagactggataatttataaagaaaaatatgtttcatggattcacagttccatgtggctggggacacctcacaatcacaatcatggcggaagtcaaaaggcctgtcttatatcatggtagacaagagagaaaatgagagctaagcgaaaggggtttttcgttataaaaccatcagatcttatgagacttattcactaccatgagagcagtatgggggaaactgcccccatgattcaattatttcccacagggtccctcccccaatatgtgggaattattggaactacaattcaagatgaggttggggcggggacacagccaaatcatatcaataatcaaacttgaaaatagaacaatagagattatgcaatctgaatagaagaaataaaaattttgtatatttataatatataactttaatgaatggcgtgtttgtatatgcgtgcacatacaaacacaagaacttccatcatgaagcattatggatgtgctttggtgcttggaagcatgggtgtgctccaggcatagctctatgacaatttggcaggactgttaagtatacagctgggagaatcagaccgcctgcatgcaactcccagttctgccatttattagccatgttacttgatatctagaaaatgagataataaagtcttcatggtgttcttgaagattaaatgacttcttaatgcatataaagtcctagaaagcaccaggcgaatagtaaatgctcaattttaggtatcattattgatcttctttagattctgcccttccaggagataaaagatttgttttgttttgcttcacatctggatcatgtgttaaatttagattgtttccaatctaagaagagatcttcataatatgtcttattgtaacggtgtttgcaactgtcacacttttatctgtaatcgctttatagtttgcaaattgtaatgtgcagctgttagcatgtcatgagttttacctgggagatggctgattttcaggactatcataagtgcatttatattacttttcatcttttgtgtggtatctgaacagagtagggatatgataacaacacagactattttgggacccttcaatgtggtctgcctgactcttgtttctccctgtttcacttctttctagatatgagggtacgggtgtttttctcttttgttcactgttacgtctatcacctagaatagtgcctggcaatcagtaagcacagaagaatatatcatggtatctcataatctaaaaccatttactttccagtagatgcccaagtcctttgattttattccggtctcaaactaccttacatgataaccattttaaaaattatatgtctgatgctgtattagcctgttttcacaccgctctaaagaaatacatgaggccgggcgcagtggctcacgcctgtaatcccagcactttgggaggccaaggagggcggatcaagaggtcatgagattgaggccatcctggctaacacgatgaaaccctatctctactaaaaatacaaaaaattagccgcacatggtggcaggtgcctgtagtcccagctacttgcaaggctgaagcaagagaatggcatgaacctgggaggcggagcttgcagtgagccgagatcgcgctacagcactccagcctggatgacagagtgagactccgtctcaaaaaaaagaaaagaaatacatgagactggtaatttataaaggaaagaagtttaattgactcacagttctgcatggcttgggaggcctcaggaaacttacaatctgatggaaagggaagctggcatctttttcacaaggcggcaggagagaaaagagcatgtgaagggaggaactgtcaaacacttacaaaaccatcagatagtgtgagaactcatgagaacagcatgggggaaaccacccccatgatccaattatctcccactaggcccctccttcgacacatagggattatgaaaattacaatttgagatgagatttgggtggggacacagagccaaaccacatcagatgtttctgttaaattgaatagtttgttataatctgagcatcctccttctttctttcctttatgtctatagagatactacctgatctacctgttcaatatgatgccattgcttctttcattacaaaccctacccatctaccaagaccaacacagactctatcccatctgccttaattgccttcatccttcagcttccctcctctgaatgttacttgctttgtatttatttcctgtgtcatttaaccacttgtatgttccagtacagttacttgtgcattctgtgtctccctttagaacagggaccttgtctgtttcacctttgtattctccatagtgcatgtaggtagcaaatatttgacaacagccaatatttaataaagacctactcagtgacagatactgaacccaatgactggtttgattcctaggaatgtgagtgatattctcttcctgtgttttctaaaattatttgcctagtgaatatttaaacaaattcacatgttgaacatcatagtgtttcaaaacagcccctggacttggtatcagatatattgagtcaaatccagagatgctgtgtgactttgggatgataacatacccctttaagagtcttggttttcccaaacaccacatgttctcactcataggtgggaactgaacaatgagaacacatggacacaggaaggggaacatcacacactggggcctgttgtggggtggcgggaggtgggagggatagcattaggagatatacctaatgttaaatgacgagtcaatgggtgcagcacaccaacatggcacatgtatacatatgtaactaacctgcacgttgtgcacatgtaccctaaaacttaaagtataataataataaaaaaagtcttggttttcttgtctgcaagtaggaataatagaatcacactatagtgttaatcgaggtaacaaattgtcggtaacctcagactgaggaaggtatcaaataaaagtgagttttcagccaggcgcagtgggctcacgtttgtaatcccagcactttgggaggccaaggtgggtggattgtttgaggtcaggagttcaagaccagcctgggcaacatggcaaaaacccatctctacaaaatatctaaaaatcagctgggcatggtggcatgcgcctgtaatcccagctgctcggtaggctgaggcaggagaattgcttgaaccagggaggcagaggctgcagtgagcgaagatcacactgctgcactccagcctaggcaacagagtgagactgtctcaaaaaaataaaaaataaaaataagtcagttttcctctttccctatttgaataaaagtaaaatgagtttttcaagggtgtcattagctttatgttattgttctaactctgcctctatcagatattctttgaatgggccaaactctcacaatggctggacactggggatgttatgatgccagaccatgctgctactttttccttcctttaaaagctctctggtaaatatcgatttgtctgctctggtggttataaactgctgctctcctcctattcttcatgaaatacagggattctaagttttgttttatgtacttgtgttttatctatcgcatacagaattgcaaacaatactatttgtgaggggcgttttgactttttcaaaatatcttcatatccattatttaatttggtacccttcacaagtctatgagcctggtagggcaggtacctgtgtcatcataatccccttacaaatgaggaaatagagcctcagaggttaagtggtctgcccagcgtcacacagattaaaaggtggtaacaacaagggttcatcaaacacaagtcactaggctacaaatctggcaccctctctactcgcttagcctgaaagcaaaggggtatttggcaactgtgacatccgtcatcctaacgatcttctccattcttctttggcagaggcatccatcctgagctatgatggtagcatgtacatgaagatcatcatgcccatggtcatgcatactgaggcagaggatgtgtccttccgcttcatgtcccagcgagcttatgggctgctggtggctacgacctccagggactctgccgacaccctgcgtctggagctggatggggggcgtgtcaagctcatggttaacttaggtatcgtatgaagtaccctctgccacttcgtttgggcttgtcttccctttcttttctgattttcattggtttgattgaattctttgtttgtttcttgaaagttagctgctcacctcttgtttaacagacccaggataaaacccaacagcagcgatcaccttctccttgtttctgcatgaggttttgatgtcaatttctggtttctgacagtggtgatttctttactagattatttgttttctaagtttcctttcttggttttttggaatcgtttagctttgtgtaaaacacgctactttggtccatcttttgatcaatcatattcccataagtccaactcctcagtcaccactcaaaacagtcacagctgaggtcagggacagggcaggaagtggaggcaaaatgttgatggtggggttgtaggaaattaaactttgtgggtagggtgagaagtacattgtttctagctccacagctactattcaaatggagaattctggtggccttgatgacactgatatctcctttgactttctcctagagggaggacaagtagattgttgttcccttggaaaataattccctaagttgagtctgtgacacgtggaaggaaaatgtgtctcctgatacgtatacccatttttcttcttgacattcttaaccatcactcagcatccccttgtgcaaagattgttaccttgtactatcactcactaataactctcttcttcttatataatacatatctattttacctcagagttgaaaaattatgacttcaaatttgtggctttattggaataggattttctctttcattgtaattacctataacagaatctttagaaattttcctttatatggcctcatattctcttctgctattgacctttactgaattctaattgatattctatagagattgggatcctcttggtttttggcaaggaaaaaacaaacaaacactccatttctgctgtttctaatcagcagaaagtcaatacccagcattgataagattagtgagacagctgggtccaaactttctaagctagtgaatgtatttgggtacgtagaatatgtttggatacagtgataccttataaagatttcagtgaaatggtttgtcagagccatggagaaaaaatgatgaacaaatgtaccagatgcaagatcatatgtaggcccacatgtcctggtgggaaggtggggtttttgaatccataccaatcttatctgctgtcaggtcaactggacacacttggaaaatgcctacatcataaacctaaaatctctgggacacaaaggactgttttgagcagtgacttctttagttatgtcttttttttttcttctagttttcagtgtttacagtaccgtgctctttttcttgtccaacttcatttgatttctgttgtcagtgtgtctcttggtttttcttttgtttgtgtattgtgtgtttggtcattttaggttatatttttttcttttgctggatctttttgtgtgcgtgtgttcctgagtttccaatcctccccgccatcaaccatggtaaatcaaaagatggtattcaacccttcaaaggcccaaagcctgcggcccgcatagcaaacagccttgagaacacagcgtattgagcagcctacagagactggcatacccctgaccctactaccttccatccctgcaccatcctacccaccttaaatcaatataagagtgtgttacctaaaaccaacagccagcagctgattatctcctcagaaaaaaacaacagaaaaaaaaaaaaaacagaaccaaatacaaccccataactagctcactgaaaaagatgatgaagacaatttttatctctggatctatttcaaagtcagagagagacaaacatatgagaatgattcagccccacgcgatcctgagggagtgtacacagtgtcattaaacagacatttttttccccattaggtgttgtttagtaaagattagagtgtcaactttgacaggtctcacatcttagaaggaaaaactggggtcagtgggggtacaaataaaagcgtataagaaataaggaaataagtgtacagattctcattctctctctcacacacacacacatacaccttgagttggtcatacatcccacatgcatttctagaagcattatttttgtattttaaactctagtcaaagtctgagagatgtgcttttccaatagactttgctttttttttttttttttcccctttggcttcttttgttgcaatttcaatctagctcctgctgcgttgaaccatctcaggcaaaggagaggtagcctctctgtagagagcactgtgcttgtccagaagccatagttaattttttttacaccaaaggataggttcatcataattactggtttgaatttatttaactttctttccaacctgacatggaaaactgaacttaaactctcatgcttgtgtaaatgcagctcttcatatccacgccttgtttaaaggttttccttccgttccctccccaaaatatacccctttgcaaatattttctttctctttgccgtgaatttgtgtttcatttttctcaattacagaagaaaatgtatccaagtagaatttgtcttcacatgcattccaccaaaattaatttcaaatgatcactttgctccctcactctattcaagttgtgtcttttttctagcccatgcactaacaatattttagtttatttcaaattgatcacacatatgcattcatgatataaaagcctagtatatatttctctgatgtaacatatcttccaaatgtcaaggagactagggttttccaatggctttatcttctgcaggcagccatatgtggtgctaacaggtatgagaaatatcctataactcagcacaacttttaaaaagttgagaggttgactattgatcaaccatattttgattctttagaattataagctataacattttattattacagcatatttaaagatttaaaagaccttatcttattttaatctcatgatctcatggatctcatgcgattaatgataatctcatgataattttgtgagataaatcaagcaagtgtttttatgcttacttttacagatgtgtagcacagagagaaatatattacttttcaaagcttacataaaaagttggagacagagctggaactagaacccatgtctctaaactgctagatcagcctgcgttatttgtttccttcacagatcagcactatgggtcaatgatgtgttagtcttaatggcttccaattgtttttatgatggtcacctttgaaacacacacagagagaatctccattttcctcagtgcccagtttgaattgagctgcactagggaaaagacagttgatatggacaaaacctttaaaagatccttagcagagtgccaggagcccttcttcaatggcagactctgagggagtggcatgtagtttggtaaattgcatttgaattctccagatgttctctctctggaaatgtggacttgctattactgtttaccaaacacattattgaagacacacagctcttagaaacatttacctcttccatgctcgacccaaagctcaacaacgagaaaaactttcttggccaggcaccttaatctaattacagacacttaggcctgtaatcccagctctttgggaggccgaggcagcccatcacgaggtcaggagaccagcctggccaacatggtgaaacctcatctctactaaaatacaaaaattacctgggcttggtggtgcgtgcctgtgatcccagctactcgagaggctgaggcaggagaatcgcttgaacacaggaggtggaggttgcagtgagccgagatctcaccattgcactcaaacctgggcaataaagtgagattctgtctcaaaaaaaaaaaaaaaaaaaaagaaagaaaagaaaaagaaagagaaagaaagaaaaaaactttctatcatttaccataatttaaaacaaaacaaaattaaaacaggcaacacacagatatgaacacatacacatcaaaagatatgccaagacttaggcagacttttttcaagcaaaaagtctggctgctaccaaacgtagatttaaaggaaattgccttcccaactcagttctttgactcatattttttatttaaaaaaccacatatataaatgtgtatgtgtgcgtgtgtctatatacacacgcacacacacacatatttatacatatatacatacacattcagtaacaagaacaccccctcagagcctatcaagaaggctctgggatagattttccttctcaaaccacttgttcttcaggtaaaataacaaagtaattcttcacatattgaggtaaagtaaacaaactgtctgccatcttgaaagcgccaagctcttacattggtttaaagaccgcatccactttacatgaaatcatttgagtgatccagaaagatgagcccaagccaccacctctcactaggccagcttcttgtctaataataaaatcctcagctatgcagaagccgaagacaaaacccacttgttgtttgcagtccttgggtttgttgctttaggctcactcttcctctcataagcgtgcccatacaccagtttcctctctctctttaatatgtcaggaagggacatttctccagctttgggtgatggtaggtgcagtcagtagctgaagccatcacctcttcctccctccctgccctccctccttccagtcctcaccaggggcatggcctcctctgtctggtaatcataccggttgctccagggctgtttgctcccacttttctgttgcggttgacgacacatgacaaacctaaccgcacgaaaccaaacccagatttttctcaagagatgttcttctcgggaacaaataagcattctgcctccttactcagaataactgggtgctataaatcgctcctctccagatttcacgtagcttcattctcccctttattcttgctcctttaaaatgattcactttggggaattcaaatggtggcatcatccttgacaagtcctctaaaaactactgggtcaaccttaagcagaagaagagtactttgtgactatattttcccctctatctttcttcctttaaaaaaaaaatcatttcgcttctaccttttagtatctaacggtaaacaaatccttattggaatttccaccatgataaaccaaccttaggctgaaccgggcagcttggtaacaactaacctgagacctttctctgaccttttctgcccagtcccctactatgcccactgattctactcaaggacttctatgttgtgtgtccatgactcccaagcagagattaatacaatgatagatatgctgatctctggcacagaataccttgtctgattactagctctggccagttggtcactcttttcttccctccctttcccatttaaaaaagtgaaacaaaaaccaaaaaattttctctcctcaagatgtggaatcacagagtgaaaaatactcaagatgtcaaaggtgccgagacctcctccacacgtgcctggcttgccttctccctgaatgctgtgggcacttgattcagtctgcgtattcaggcaggaagacagagatgggctgcgcgagggggttgatctgggagcctttgaatcactagcaatcagagaacccaattcattgtgataacatcatacaactcctttgaccctacacccgaccccacctctctaaaatctgggatgggtgtttgtgcggttagctgtttgcaagtggccattttatgacaggaaatgaccaggtggtgttaaccctttccttaccactaaggaagatggcaagtgtgcctatgcaaatttctatagcatttggggcccaacctaaggagagggtggagggagtttgattttagaaaaagagaaagggttaagtacgtcactgagcaacttcatgggcagattttttaaatgatacaatcagtcagactggtgatatgtctttggaatactaatacaaaaattgtgttaatgctactttaaaaacgaattttaagaaaataaattatagaggaaaatagaatataacctgcatttggtggggggaattattgcctatttttccaagtttgacaaaattaatatttcaaagtccaggtttgaaatactttatataaaagaatagctttttttgaaaaaaaaaaaatgtttggtgtctactgtggatatatatgtataccagtatatatctctatacatatgtgtatatatatgtgtgtgtgtgtatatatatatgtatccaactttactaaataatatactgtacatatacacccacccttaaacttgtacatactttatatatataaaatggccacatttcttacgtgtgtctgtccccggaagggtggactgattgtttttggatgtctgcagctgttaccttgaaggatgcaatttcatctttcatttatttttccccatctagactgtatcaggataaactgtaactccagtaagttttccctcaagtttcattttgttctttaaaaaaaaaaaacaaaactgactttattttgtttactgttttatgagctgttttttatttgaattattttttcttttaacaatggagtgggggggacctggggctaagaagatggggggctgggtgagggtgaagggctgagtgtggttttgggtgtggtttctgaagtgagggcaggtcctctcttctttccttgcatttgctctatatgaagaaaagaaggcaagggcacatgaataatgaaataatgaaaaatcaagttgaaatgatgatttattgtttttgggaggtaactctgagagtgaacaaaaagctttagggcaaccagcatgcacttctccactaccaaacagtttagaaaataaaagcactgttcttgacccacaggtggctgccaactctgacatttctttcccagtatttatctctgttgggaacttctagcaggtgggcagatcactgctattggtgataaggcaacactttaaccaaagacttgagacacactctgtctctgcaaaaggaagaactgcagtattattttcaccttatcccattcagataccctagttcttgaagaagggtcctaacaaggcacaggatgaaaactactcatgtatttcttcctcttccttagaagtaaacattagcttgagtcaacatgtagaaggggaatatgaagataaataggaagaataggcacaagagaaagaataggcctagatgatgaaaggaacaaaggaagaaatatgctttgagtactatagcatattatattaggcttattaatactaactactgtaacaagcaatcccaacattataatggctcaacaaaagaaggttttatttcttgttcagtcaaagtccaatgctaattggtcagttttcccagacagctctcttcaaagaggtaattcagggatctaggatccttccatgaggtgggtccaccacctcggagttctttacttctggctgtatccgtagggaagagagagagagagagagcttgggtggttgtgcagtaggttttattgccttgcctggaagtaacaaacatcgcttctatccatatttggtttgctagacatgactccatcctacatgcaaaggaagctgggaaatgtagtcggctagtgcacccaggagaagaaaaactggattagttgatatctagcacatgtaattctccatagtatctcatcatctttaaaattctttcctcactaggaaaaatccaacttttacatttggtttacttgttgattccatcctagtaagtcttttataggtgctagtttaaacttctttcttggtagaagatatattataggcatgacaaactaataaagcccaattctactttttggggggcaaatgttccatctaagttaacacaaaaagaagaaatttaaaatatcgatataagcaactgcttactaaatagagtgctttatccttgtcttggcatcacttacagttattttaagcaatggcctattttctgtgtttaaatatttctaattagccagaaatttgtcatgatatttagatcattaaaagcctaattgaaacatcctttctctccaaagcctggagttttctgttcctgtttttttggtttgtttgtttttttaagcagctttattgagatacaattttcataccactacatttacccatcataaacctacagtttaaggatgataattaaacttataaagttgtccaaatatcaccacaatcacattttagaacatttccatcatccccaagatttcttttctggtcatttgtagctaatccctgctcctacccatcgtcctaggtaactattggtgtgctttgttccaataaatatgccttttttggacattttatgtacatggaattagacaaattgttatatagtcattgtatcttgcttcttcaaaaaattttaatggcatttctatggaaatattttctctttccttttgcattggttttcagaaggaaataaggtggaaacccagcatgaaggtggaaagcctcgtatccgaagctacatctagcatcttctagcttcagagacttatttggagaacagggaactgaggcagttatttaatcaggatatcagaatttgcttttgctgttctatccacactttctcatgaagtcaatcccatatattccacatgatcagccacggaaagtcatcataagacaactcccaggattacctctgttgggaagatggtgacacagatgacagcaggttttcttaatctgataaaatattttctatttacaccccaccaaaaacagcattgagaggaaaatatgtcagcaaagttatattcccagctttgatcacaaagtatagaaagaatataactgatttcaattcaatacttacataaagaatcaagattagattttggaaattgtttttgagattttcacaataaacctttaatgtactaagaacatttattttgttggaaatttaatatcagagaaataatacagtgctcaatggttgaccagtgtttgactggaaaaaacaaatatacatgggtcttttaaactaatctaacacctttagagctaaacaatgtaaccacgtatctagggttatgtagagtcacaaagtaaatataatacattttttttctgaagctaattttaattgttaatatggagtaaaagtttaaattgaaaccaagttgatatattatgcagaagaatgcaaataagcataaatctttaagaaaaaaacataagaattcaaagacatttcatttttattgtgaatcttctctatttcatccctggtattattggcatttgagtggaaaagtttgagaagactatgcaattaaatttggagagaaaaagggcctacatgatccgaacttctaagcccctcttcttattgactccatgtcagatttcatagcttgacctgttacaggatctcacattgtctctgtaataggtgtgccggtccttactcttatctgattttcaactgtgagagtatttgcaccctgggtttgagggagaggaggttttccctgagccttacctcttgctgctatttcaatagaagtcatagggtaccttgcttaattttcaaaacagagcttcttttttttttcccccttgaagggaaatactgaattaaatttgaatcaaggtggattataagtttgtgaactttttcagtcattcttttttagaatgcctgtcctctgaaaagtcacttgggtaaaatactgaatgacatcagctatttttttttcctgttcatctgctataaaatgttgtttgttctgggaaatggctatttccaaggcattctgtgacactctttaatggagacaagagcatgaaaaagaaggatgatcttccagcatcgagagaaatcaatgggccatgagagagaagggtgatcttgaggggaaaaaaagcagttttcttctagccttcttccttttggcttcacttcctggcccttttgtcagagactatggcccagttccatgccaagtatttcctcccaagaagaaaagcaattttctaatcagctcttctttctgcctttcttaacttctcttttttaatactttgtctttcctcatggtatctatgatatattcattattattcattacaaatcctactactcctgctttccaaatcctccaagaataccacaccataaattgctctctagttactatcaataaacatatattacagagtgtgtaaatcaaggtctttggttgaatcaagtttgttgctgaatttgattcatctggcgggaatgtatttcttaatacacttaatacatatagttctagcttagaatttatttttaaattgcaaaagaacaacagagttggcagccatcatggcgaattgaactacagggtgacctggaacactactaaaggaaaacagaactggccggatgtggtagctcacacctgtaatgccagcactttgggaggccgaggtaggcagattacgaggtcaagggatcgagaccatcctggccaacatggtgaaaccccatttctactaaaaatacaaaaattagccgggtgtggtggtgtgcacctgtagtcccagctactcgggaggctgaggcaggagaatcgcttgaatccaggaggcggaggttgcagtgtgctgagattgtgccactgcactccagcctggcgactgagcgagactccatctcaaaaacaaaaacaaaaacaaaagcaaaaagaaccagggctgttttctggagaatttctggaggaaatgtcctgttcctatggctgtagttccataaggctggcagtaacctaagaggcacgcggttctgaaaacaggtatgaacttctcgttggtgtcatgagtgcgcaagtgaaagtatggaaaatgactttttgtctttgaccttgtctgattgtgcctttccctgtgatttcctagccactaatttattctatccctttcaagccatgtgcagtatgaatgaatatagagaactaataataattaaatatatggatagcttgaatgaatacagtaaacacatattaatgaatttcaactttttctttctttttctatttctctttcctctcaaacgctaattcttctgtgttgtggccatcttcattatctttctaaaatggagtgtatatgtggcatggaaattgtgagtttgtgtataagcctgattatttaggtatatgtaacagtgtctctctcactaattactttgaacctgaagacccactaatttctctgtgacaaggtttattttttcttcttagacacagaggagaaaggaagtagtgtgctgtacaaaaatatattgaccttaagacacttaagtgccacaatagagttatttgtgtcagagaatagctttgatgatcttgtgtattccctatataagctgatacctttgattcatcatagaggtgcacagtaatctcagagatgtatgaaaataacatcacaaggatatgatatctgcaaattttatctcccaagactactagtgtttgagtctttctcctcttggacttgcttggataatttgtttctttcttttttttttttttttttttttgccttttcccttagcttctctgccttaagtttctaagcagactccatttccagtgctttggaaaaattaacagcatgtgggtggttattgcttaatttaggcatagtttagtgagctgcagtttattatactggacttatggttttcttctctttcttttactctgtctttcctctccatggtacaagaatatgttatttcatctttacgaatcgtttatctgagaatctcagagccaaattgtttagctctttcctttaactcagaaactcttgcctcagaccaataaggagggctgacttcttcatcactaaaagtcattctcaaaggaaattgtagaaccctctttggtatccattttaaaagtcaagtaatcattactgtcagccatttacctggtgatgccacttattagaatcttagcagagatggaaaagcaagagcctatgtatcataatgtattctctgtcaaactataagcaagctataagcattgcacttcagagtttctatcttcataacgcatatttttgcttcttttggtatgttttatatttcttgtaacatatagaacacttcaagtgtaacaatatttatcgtatcaataacagccagattttagtatgatagtgggatgcttcctaaatatataatattaaacacttcttaataaatattaattcagattggtttattttaaaatagttaataagattatacatggaacaaaaggcaaaatagtaaaaattcttcccactcatcgtattcctcaaactccttttcccaaaggcaaccaaatttattagggatttttgtatcttctttcaggggtagcctatgagtatacaacatataattatatccacgttcttctccttttcttctttctgctcctccttctttttgacacaaataccaacaagcttttccacatcttatttttccactaaaaatgtcttagagactattccatgtaagaatatataggtttattttattccgtctaatagccacataacatttcattttaggggggtgctatattttattaaatcagcaccgtacatttaaatttttctcagctttttactactaaaaatgtaagaagtatatacttttgttcattagttaatgcatacatgtataagaagatctattggataaattcctaaaagtagaactgctgagtcaaaagataagtgcattataaatattgatatatattaccaaattgcactccaaagaggttttacaaagttatatttctaccagcaatatatgtgtttgcttctcctcactcttgtaacacacatcatattatcaaactgtattttcattctcttaagatagcttttcaaaatgttgctgtcacatatttatttcccatagatcttttcctcccatcctttaacatcttcaaatatacatagggatcattgtcattcatgactttggtgacaacttatatcagaaatcttttaatagcaatctgctgtagcaacatttcatatgttaatcttgttttgataaacagggatattgtagaaaagtagcaatatgttatagtaattttgtgtaatttatctcctacattattattgatctgtgttgggatctcagcacagacaggcatttagtgcaattacaaagagcaaggaggacactggagccaaatagcctgggttcaacacttgtctatgccacaaatgagctacatgtctttgacaagttgcttcaactcttagtttcctcaattgtaagtttcatatgaaatttagaaagaataaagggaatgggatctagcaccaaattaaaaagtaaacgtgatgtgaacttgaggcattaaattacaaataagtggtttccaaaagagagtatgctttgtctcatcaaaggaagaagcagaggaaacagcaaaagaggaggagaaaaagaacttgttcaaagcacaagccttcataagttatgtcttagtccatttggtgttgctatgatagaatacttggggctaggtaatttataaagataagaggattatttggctcttgattctggtggctgaaagtttcaagagcgggcagttgcatttggcgagggcttcatgctgcttccactcatggaggaagacagaaggggaggtagtatgtgcaaaaagatcacttggtgagagaggaagcaagagagagaaaccaaagaatatagactctttttaacaacccactctaaagggtactgatctattcccatgtacaaagagaagtcactaacccctgcctgagggcattaatctatttatgagggattcaccccgtgactcaaacgcctcccactgagcactgccaccacaaaaaaaaaggaagcaaatttcaacatgagttttggggggaacataccatatccaaaccatagcaagatatatggatataaacaaagttaatagagctgctgaattctaggaaggattgctagacaaaggaataaatttttaatatctgaacatcttaaaataggcaaatacccagccaatgtagaaattttatattgttaaatatcaggttaatagaggcagtatatagactcatataactgtttatcaatcacaatttgaactgctgtattatgttaaattagtgtacatggtttagatatataaagttagtgtacctagtttggaggtatgtatacacacacctgcacacacaaagagtgagagagagaaatatctaatgccagtacagcctaaaatttttacattgatatctgccactgtatgatttttatgacttgaagctaccttggatatagtatatgcttggtaaataattgctaagtaagtgaatggggtaatgaattgtatccattgcgctaccttaatttattatttatacaaaattgttaagaatcaacatgcaaggtacaagcctaaaaattgtaaagtacagtgttttgtcttgttgtcactcagaaaggaagaaaattaaccaaggagtgaatttgtcgtcttaacctaataatctaaaggaatatatattactttctctgtaaaataagagatttctgacaaataaatattttcatgaagtctgattgggccatattttggttgaaagtaaggaaaatttcatgaaggaagatgaacgtgtatctgtaaatattgcatgttgtcattcttccttgttcttcctcattcacttattccatggacatttactgagagtaagcagagttccaagagctgagtgtcattttaggaatttatactgcaaatttccaaggaaaatgtaggaggaattctcatagactgagtaatttctttatcccaccctactcttccctttcacattgcccacctccatttcttgtttttcttgaagaaattggacctcagatgtatgtatctctaaaatccagatgagtctcttatggattttgttcagggctaattcaacattcaattcaacataatgatgtcttttttcacaatgtgtgtgcatttctcatgatggggccctaaatgctggtttacttagggattttcctgatttccttttttgttttgatttgccctccttcatctgaccacttgcttggagcctcgcaagctgtgtttctgctcccctttaaaaggctgatgtttcagggactgtaattttagtaaaaatactatttctgttttccttctacctttccaagatttctttatgtactccaatccattttatgtgtctaattgctatagtcagatatacaaggtgacaaattctgtaagtacagttggtcctccataactgctggttctgcatctgcagattcaactaacaaaaaaattgaaaataattttaaaaaacaataaaaaaccaatataacaatagaaaataatacaaataaaaatacatataacagctatttgcatagcatgtacattgtgttaaatattataagtaatttagagattagagtataggaggatgtacatagtttatatgcacataatataagacaccattttatataaggaacttaagcatctacaaattttggtattcacaagggtcctggaactaatttctcatggacaccaaattaggaccgtattagtttcaggcacagtttatattttgaaaattaggaggtattatggtaaatttaaatggaaactgggcctgagaaatccctgagcagaacaaagccagttaggccgcataaatgaccttaaccttgctggatttgcaaataagagcaaaagttaatttgagctacagctcataaatacctatattcagagaaaacagaatgtaagctcaaccaatcagaagcagccaacaaatttataattatataactagggactttccaataggataggccaaataaggcaacagtgtaactgtaatccatcaaatattttctttgctttactcgcctatttatcctataaaagcctgctatttgcattccctcagtggagctcctgagccacttttgatttagagcttccctgtccaattcatgaatcactgtttgttaataaagtccttaaaatttttattgtgcctcagtttatcttttaaccgtttgacctctatgcggtgtaggatgtacagtgaccatttggtaagctaatattattaacctaaattctttattcttgtttggtaacaagataaatgtattaatggatgtatttccctttcattatgcctaatatatataaattatatgtataaagtacatatatacatatatatatatataaattgcagttgtttttatgcatatcataaaagataatataatttgaattctggagtttccagaataattagccacaaaatgaaagtctgtttactgattcaaagcatctcaggaaacacagtttccaattttgggaagaaaactttacagaccaggagatgttatttctaaaaaaaaaaaaaaaaaaaaatggagtaattttctggctgttctgttgacttactagaatcacatagctttttaactctgagtttatttgaagttagggaaataaaactaagaagactttatacatttccttctcaaaattaagctgtttcagaggaaatctgactatataatatctgttcagaaaatcattgtcatccccaagcctgtgccagccctctgtcagcagcactgtcctcaaagattcctcaagggaccctgtggaaaaatgaaaacaagagaggctatcaaggggtgcaagtaagaggtgcagtgttgagttataataatctaagtgtccttcctaaatggctgaaagtatattgcagtagaaaagtattaaaatgtgtatgtgtcccaaaaaagaggcaaaatgtaatggagatcatgtcctctaaagcaaaatatttggatggttatgaactcaggatcctccaataggcctgctggggcacatttcttttttaatatcaacatattacaaatggggaaaccaaggctcatggacactgagtgcttgacataaaatctcaaggtgatgaatggtaggcatgaacctttataaatttagttttataattcttcatcatatgagtactcttttgtcccctaaatcaagctgtctcttaatgatgacacaggactttgtttttaaaggattaatggggaaaaaagagggggatcactgcaaaggtaacgaattagaatatttttacctaaaccgatgaataggagtggaatgaaatttatttctgaaatccaggagatgacagagaaatgaaattggtgttatccacaagtgcgggcaggataaaatctaaagcaataaacagagggctgctcctctgttccagtataataaaaagtaatatttgaaacacaaaagcgagagagaggaagacctgcttatttcctgtgaggggttttcctgtgataggaggcacttttcttcctttcctccccagaatccgaggagaaggaactgccccactgaccagagtgacaatgcccataggactgaaggggtaagagcaacagaaacggaatgcttgaaaggagcagaaacagtgtatggcagcagcaaatgtgtgtcagatagaaagacaaagggaaagggacacaaagaagtattcacaatggagcaacacacatgtagtgtgttttataatgctggaaaaattctgtacctttcccatctcacagagaaaagagaacacaaaggaagatggataaaaaaaaaaaatgatgcagccactgggccggttatctctggctagagaaggattaccatttccttacaaaaagaaattgataattgaaattaaactcagattgcccaggtatacctgccggcagttggaatgtttaacttaactgctcggtttacttattgacaagcaaactcccttttactaatagaaccaatttacaaaactttccggtcatcataaatagaaaagccagatatggtaacaccgcgatgactagttaagtactcaggtacttatccatgactttgtttatccatcctcctacatatctgatagaaaacacaaggagtaggaatctcatggttaacatttcaaaggcatgaaaattgaatactaagtgaagatacaacttcattctttcccctcttcatatcttcctggaccctttttctcctttgtcacagcaaaataatataggctactaagtctatgcacaaggatatttacaataaacatttgacagtctttgctattgctatatgaagtgcatgcacttgacaggtggctactaattattatagtaaaaacaatagcattgagtgatttctgccattatgggataagaagtttgctggcattatcttatttaatcttcaccacaatcttataaggtaggtgtcattaccctcattttagaaatgagacttgttcatatggaggctgggtgtggtgtctcaggtctgtaatcccagcactttgggaggccgaggtgggtagatcacttgaggtcaggagttcgagaccatcctggccaacatggtgaaaccctgtctctgctaaaaatacaaaaattacccgggcatggctttggacacctgcaatcccagctacttgggaggctgaggcaggagaatcacttgaacctgggaggtggaggttacagtgagccgagatcgtgccactggactccagcctgggtaacagagcaagattctatctcaaaaaacaaaacaaacaaccaacaacaaaaacaaacaaaaaaaaaaaaaagaaaagaaagaaatgagacttagtcatatggaatgttttgcctagcttcagattcagtctactccattccaaagcctctgctcctcaccattgtacatattgcctctgccacttgtatgctgaagtgttaatgcctaaatgaatgaaatctatcactctagaacaagtgctgatggtcccatgaaagaggccacttctaatcactaatacctcctatctctgtaggtagtctttctgaagtcttgaccttccagagtcaagctccctcagctcagctctataggcatattagtgccccatgcttgccataaccagtctcgaaggcattgtctatttcagtgactgaaaggtacttggcatttagagatgcatagaagatgaattaggaattattattcaggaacagagacaactaagaagaggataacattagaatgccataattcaacttatgtttattactgatgaatcactctccacatgactgatgctttgttgaccttctcttggtaatgctggtactctctgtctcttatttccttccattgtactctagtcctctagtcttagccaacaggttgtggctgctgcaatccccgaggctcttctacgctacctctgtgtccatgctttgctgtgtgccctatagactgttcctctgtatctgcctttgcaacagctgtctgctcatccttcataacagctcaaggggttaccacctagatgaaaccttccttctactccaggcaggtctagctttttccacctttaagttctcctggcacttcgcacatctttcagaactcttatcacagttatatgctgtaaacaaagaatcatgggttttataaaattggaaaggagaactttatttctcataaagggttgcagcctgcaggctggccatcccagaggctgggaagcatagcctctggcaaaagctgagagcaagcacattgaggtgatcaggggtaaagggaacaggaatttatgctgagcagggtagctgaatatacatatttaatacactatagaaagagtcatgaatatttacggaggagaaccatgcaaatgtgcaattgagcttcatgcctcttcatgggttacacgttaaaaaaaaaatagctgtgttagcatgatctgagggtggagtttttggccctctgacatcaaaaagtaaaccagaggatatgaaaattgccagtgtatatcccccacaggtcagccaaaactggtccagagatggtggttggtttttaggaagggatgccttgtgaaactgattaactgtcacatcaatactgtaaagagggagagagagtctggttgtggcctcaggtgattggctaaagacaataaagaaatgggtcacctgcttcttttttttttttttttttttttccagagctggtttctgttgctccttaggaaagaatcctggttaaaggtgaataaggaaggggtatactgaggcatgaatatactaaggcatatctaccctccctgcccatcatggctggaaacttagtttttaaggtttctctgggtactccttggccaataggggattctgttcattcagtcaagggacttgagattttatttttagttatctattctttatttgtttccatgagtatcttcagaaccaacctctggactcctcatgatttggggaaatgcactattcatcattgtatcttcaccatctagcacggtgctaatcatatagaaggcattagtgaacacttattgaattaacaattgtaagtttaatgacttgaaactttgagccacaggagaaatctgtagataaacacagatttcttagtaagaggaaaattattccatccttacaaagacagaaatctcagcagatcagatgaaaataccatagattatcataatgagggcacttgcccaactcttgaagggaaatatgtttttagaaacccttattaaatactacaatatcagaaggctaaatttaaattaaaaaaatgtgattccaaaacaatctgagcacaacggggtgaccacagtcaacaatatttcattgtacatttagaaataactaaaaaaaatactaggattgtttgtaacacaaagaaatggtaaatgcttgaggtgaaggatactccatttaccctgatgtgattattacacatcatatgcctgtatcaaaatatttcatatactcaataaatatatacacctactatgtacccataaaaattaaaaatataaaagtaaaaatcggatccatcttttccctaaatagtggttgttcaaagagacatttaaggcacaagtgttgtttgtgcagtattgttttgcacatatcaaattctaggttttatgtcttacccaccctggatagaaatttatatccattccaggaggcggaggttgcagtgagccgagattgcaacactgcactccagcctgcgtgacagagcgagactctgcctcaaaaaaaaaaaaaaaaaaaaagaaaaagaaaaagaaaaatttgcacccattcctgtattctttttataggcttctgtaagcttcaaaaatgatccttaaagagattgaagatgatgactcagagcagaaaaataaaacaaaaacaacatgggtggcagagttgcgtgatagaaagaatggaaccttcaggtccagttaaacctgctctgctattaattagtttttggttttgaggtgatttttccaagccgtcattattagtaataagagctacaatatcattggatgaagaagaaaaatttctgaacagaagcatagctcccaaccatatgttttccataccagcatctatacaggcaccaaaaatcatggatgttcttatagccttgtgcctcacggcgtgaattgctcattgatcatttgaactcgtaacaatggaaacatcagttttaccaggcctcctgggcacttgtctgacctttctgatttgtcaaatggaattgcttcgtttgtaaaatgtttcataggagacaggacaacaatctctgtttgatgaaggtgaatgtacccaagataatttctagggttttaatggaagagttttgtgacagctggtttagcatctcatgtaaaataaattcaaggccttttgtctcactgaaagtaaggtcacattattaagagagaagatcctcctctaccaaagtcacagggattgactattcagttgaaccccagaggggctaatctgtccctgataaagttgagttggatgagtatcatgcattgcatgtgtttgcccatgatgagatatatgcagaagaaacaagaacaataatataggccaatatttaatgaggacttaccttgtaccagataatgttttcaattgtcacatgtattagatcctttaattctcacaaggatgatatggaggatacaggaccatttacattatttgtgtgatctagtgccaaataaaaatgtaagctccttgttctaaaggcagaatgaaagctttttcctttctttctcaattttttagttaacctgtcaaacatagggatactcagggagcaactgtagacccccacaggcactcacgaccccaccccacgattctttgtgtggaggcagaaggttgcagcagttgctagagggaggcagaaaagtgaatgaggaagaatctgcctgggtaggcaagaacattcaagccaaggctccaagtccctggctcatgttccattgtgccattgaacttgaaaaaacatgcacacgcataaattcacagataaaattcttaagcatttcaggacagtgactagaaagcattaagccccaaactcattgggttctaagtgactgcactggttgcatacctttgaatatggttctaaaagtaggtaataatattatctgaattttacagataaagaaactacaattaccagaaacaaagtttttgtgtttgtttgttttggtgatgtgtttgtctaccatataatcacgaaaacatactatgcctattatacaaaatttagcttgttctatattttggtatacttttaatactactgttttaaaattcttaatttctcctgcatgtcttccctcatggctaaagataaatttggtatcctatgaactatgttttccgtcaaggtttgcacaacggcataaaacaatccatcacatttttctggccaatagatacatgctttatttctgaatgtcaacgtttaagagactgaagtctgtgactactgttaattttgctagtaaaaataagttctccctgattttggttattatccattgaagatgttatcttcaatagttatccatgcctatgtcatgatatcttcacttcttcccaaatattatcttcctcagatattcaattgtgaatgaaaagtcaagctccttgtccatttttactgtacctcagccttcaaaggcctaaattaccatttcatttctgttgctgatcatcagcaactagaagacagaatttggatattctcacaccaatgtactattgctgcagaaatcctttgggctaactgagaggaccgaaaaaaaaaaaaaatacaaaagaacattccagaaataattacctattcaccatctttagtacaatgctgtacaaataattaatttttggttcgttattctctattcactttttcctaacatatggacgcatatatatgggtccagtgaatcccattcaaagagaatagatggtgggaaaactattggatgccatcagaatattttaaagaaaaaactgtcctttgaaacaaattctgcagaatattttgaacggaataagagaaaattggtttcaagttaatcagtgaaagtgaaacacttgctgaggccataataactgccattcctaagggctgacaggtcatgccattttccaatgtcttgctgaaaaaaataatttgtgtaggctaccactgagtagccatactggcttgccttgttcctgccttccttctgatttggggcactgcagtgggagctgacatgctgagctactcagctgtctcagcctcatggccaggcctcactcaaaacagtgtccgaggaaaatgacaacatccctttggggaactgagctagacctcatatagtatttgcattcatggaacagcgttttcttgtacttacagaacactttgttctatttaacagcatacatagttgtatctgattttattgccattgcctttgaaggcacacattcattgtgctatggtttggtaatgttcttctattcaaattgatttgtaacaaagaatgggtttacttggactctctgcatctagtgttggttcatgtcgcaattacctgcaggcagcaactgtttattgatgaggattttaccatagttttatgtgattacatgttagtttagctttcccttctaaatcaccacttagtttatagttcaatattatcgatccaagtgctaccagagagcaattctattgatggcatgttacgtgtttggaaggcagtctaactttcaacccacactctcttttggagagaatgttgcttcaactaacaatattgaggctcttgcttaaatattcatctcacacattagagtaattggcattaaataaacttcatatctgaatattttcattaagaactggagagttggtggtccactctaaagtgtccatatagaagttggctaactttttctgtagatggccagatagtaaatatttagatttaaaagccatatagccctgtcacaactactccattgtgctcttgtagcacaaaacagccatagacaatgtctaaacttattggtaaggctgagttccaatacaactttatttactaaaacaagtggtaggacagattttgcccaatggccatagtttgctaatccctgttctaggaccctaagagaggtacatttgtagaaattatgtttggaaagcagactagctacccagaattccaaacaataggcacatggaagtttggaaaactcttcatttaaagcattttttagttctagatgctggtaatgcaatgctgaacaagaccaacatggtttctctccttataagatttgcattaacatttgtgaatgcataaagacttaagtgagttcaagtaatgccaaatgcaataaataaaattaaacagagtaaagtaaatgcctggatgtgggaggaagtataactttagataaaactgccctggaagcttttctgagaaaatgatatttgaattttggacatttgatacttgaatgatgagaaggatctagtcttggaagggtttgggaaagagcattctgtgcagagacattgacaaaggtgaagggcttatggaagatacatacttggtgtgtttgaggaataggaagacaccagtacggttgagaagggaaagggactgttatctctatcttgaactgtccccattaaactgatctataatcagaattttaagtgagttaaattctctttctgatttacaatcatcctttcttttgttcttagtcacttgtggaggcaaattcgcaggttatctgcagcctttcatgtcaaaatgtaaatgtttataaattccaactcaccattattaaactggaagcaagccagtgtttcagttgagggacagttaaatcacactgtttgaaccatatttgaagaaatgatgacaccagtgtattagtggtaagacttgtggggttaaggatccataggtctagtcatttgagctatagagaggatttcaccatagtcaatggtcttcaattgctaaatcgggtaaaatagctcaactattagtttcactatggatgtctagaagcccaaaactcatcagttaattgaatactgtagactgggggaaaaaattattttatccaatcccaaaagaatcaactcaagtttattttacagaaaaatattgcatctagtcctatattgtaattttctgaaggtttttaaaataaaattattttaaatcctttgttgctaatggttgtaaaaacactaatccaaagagaattgccagtatctaaataaaacaccctgagttaatttgactcaaaaaatcaagtcctttgcctcagttaagtagaatgtgagaaaatggttctaacagaatcaagttcagctcagggaagttaattagagtgtcttgccttaaaagacaaggtagttttctaggcaatggtatttgataacaatgtttcacatgaatgcaacaaaattctgtgctctgttaagaattgccgaaagagaggaaaactctgtgagagagtaacctgttacagtttcagatagccagagggggaaatcagtctgaattcataaaatagtatatcatggattttttaaaaaataaaattgcttcgaaatacatacaataactcgcccaagatgtgtatgggtgcgtgtgtgtgttatctccatcccaataaatgctattgggaatatataaggctgacattatcattttagttgattaaaataaaatatctaagttactcgtagcatgcttaaaatatttttataagtaaggtaaataggcttgacaaactggtgatatcttaatttgcttctcatatccatttttatggatatgataaaggtacttgtcagcctagattttgttacaaattctcaatttatgtttgattctgaataaaattttattaaagatgtctaaatgcagcatctctgctaacataggatttccaaaattttaatttgtcaggaaaatgaagagtaagagattacattgtgtaacatagggcatttttttcctgcctcgtcttagcacaagatattacaggggtttttactctttttttaaattttaaatcaggattagtatactcatttttttcttggtgtttcctatttgtaactgatataatgccacaggcctgggagctttaaagaaaattatttaataataaaatagtatttaggagctcttttttttttcattttctgagaagatataatgcattcctttaagcattttgaatctcttctctagttggcagcagcaaatattgtaagggaatatttttgaaatatgaatcttaatcacatcttctgccatatccacaagagtttccattttatatgccacattcaacttcattcatctgacaacaatggaaaaatgttactttagacatcaatggaagttttactgagtatcatcaaatgcttagcaaatatttaaaatatttcacatattcttacgatcagaaattacacattgaagaatacttcttgatttgggaactttaataaaaagaagtgagaaatagatcttggtctgacatggaaggtggagcaagctgatgactttactaagtgacttgctacattcttatagaacaaggtagtgggagtatttttcactaaactatttatgggaccaaggtcacgtaacttactcttgtagcctaagctggtgataaggcttggacttttaatttccaaattatagcatgcaggtattagaaaactgatgacgcaagccacgattctcactgaaaaagaatagaacaatatcacacctgtaaccccagcactttgggaggtggatcacgaggtcaggagttcaagaccagcctggccaagatggtgaaaccccgtctctactaaaaatacaaaaattagccgggcgtggttgtaggcgcctgtaatcccagctacttgggatactgaggcagagaattgcttgaacccaggaggcggacgttgcagtgagccaagattgtgccactacactccagcctgggtgacagagggagactccatgtcaaaaaaaaaaaaaaaaaaaaaaaaaaacaacaacagaacaatagcactttcactcatttgcaattttagcagagttttcatgggtgaatatcaacatctgttgctccatttcctgaaaagtcctgtgggttggaatgccagtgctgtcccaattcactttgtcttttgctttagtaatagcaaaaatcaatgtaattaccatcactattcacagttttttttaataaatagtgggaccctcatttaagtcgataaaattgttctgtctcattctttgcctttgttcaggatcacatatgaaattcttttctgcaagatggttttctacctccattgaccttgaaatgaaaaattctttcaaaataaatattttacaaaattatttctaagtcgaaaaagacttagtgtcttggtgtacaagagtggggtaataccagcatgtttctcagtggggagtggggtaaaagaggaggacaaaaaggttaattaatgcataaaagtgcctagatcaaaggcaggcaccactgtaagcaaaagacatctccttgaatatttcctactaactttcaaaaacgaatggaactcagctgtggtttaaataataataatgcaagagacaaattcaagagctttgtctcttgaatcaaaaatggttgtcaagttttctggttgcatatacttaaacctgccaaaggtaatgatggctacttcaagaagtctgcctaagatgttgatacaatcaacgactctgtttagttgttcttgccaagaaagaaagaaataattccagattccaggtgttactacttagctggatgttttactttataaggaggcagcaattcatgagaaacagctgtaattacacagcattcaggtatttcataattaaactaacagctgattttaaggtggcacatggcatgagattttgcaactaggctaagtaagcatgaaagtgtagcttagttctcttgctgtcggctttggacaaatcctctctgtgccttggtgtacaagagtaggccaataccagcatgtttctcagtggggagtggggtaaaggaggaggacaagagggttaattaatgcataaaagtgcctagatcaaaggcaggcaccattgtaagcaaaagacatctccttgaatatttcctgctaactgtcaaaaacaaatggaactcagctgtggtttaaataataataatgccaaatactggaatcatagaaaactgagtattcttatcggtatccctgtgactcagtgattttggttccttagagaactcatcttgttatgtaggactgaagaggagcttggatgtcagttggataacattgatcctgttgaagctgtaccaggcactgtgtaaaatacaaaagttgtagagtcatctgcaggtctggtatacatggaatttacaatctaagtttcacgcataaaacatctttccggggaagacataagctattgcccttgaagatttgtaacctaggggttggagatagactccatgaggctgaggctcctctattccccatgcttcaggagagttgctcaagttagtcatggctgtgcctttgcttgtctctcccaagttctatttctattgcttggtaagtaaaacagcttattttcagggttctttaacaaattctgtaattagtactctaaagtgttcagtgatcctgactgtgttacttttcactattgcttaagatctcatgtcttttgagtgacctcttccttcaggaacccttagagccttggttttgtgagcccataaatgccaggaagcctccaagatttctagctttgtgaagtttacagaccattcatttccgcagtctcctgttgtcatctctaggggaattgcagtgtgtccatccacccttgaggcatggcaaggtgaacatcccttggactgaagactgaatgcttggttttgttcccatacttaatctgagagattcaaataattctttactttgctgctttcctaagactattttaataagaaaagcatcaaaagaacttggtcaagatggggaatcttgggtcaggaaaatttggagacttacttgaagagaatatttgaaaaagattcaaagattttgaactatcagggtagagggaaattgtttctggtggttaaaatggtaggaagtggctttcaaatctgaaaaaatctaaatgtttttaaggtgttccaggcactgtggttaacaatttatattccttttcttatttagtcctcccaacaaccctgccaaagaggtattattattcccctttgaagtgaggaatcttagtgcattcaaaaacattcatctactatttattgagcacccatatttctaagtgctgataatgtagttgtgaacaagacagcttatattttagaggagacaggtcattagcaactcaacaaataagtagcataattttcctaggaaaatatgttgtgcagaaggtaaggctaggttacaggtcatgccaattgaaggtgggaacacagtaggtgggtttgcaggacagaaagaatgtatgtatggctggtgagtgaacaagggaggggtggtggtgggaaaagatgcaaggatcaggcagggtcttgctggccaaggtaaggagtttgcatcttattctaggagcgacaggaagcttgaggaaacatttataaataaatgagtgatgtgattccgttatgtattgcaaagtttcctccggcagctgagaggttgaataatttgttcaaggtgaggtgggcacaaagaagaaagatggagggggataaatgactcacttggcacctgggtccctctgccttgaaatccctttcctgaatactggtctattttacttgactactagtattaagagattggaaagaaagaatgcaagtaatggtcagagaggcaaaccgacttaaaaagctgaagcaaaaagttgcattattttaggaaaatgaagcaggttcattcgtgctaactcctgggaagctggcctttgagtggctggcttgcgtggcccttgcagtgttacctggcaactaaggtaaccaggtgaggaggctcctttttaaacataccactgagaacaaagcttcgtttttggatactcaggtacaaggaggactgatatgtttgggtctcctgaactgtgttcctgaatttcctctgccttcttgctaataacctgaattgtgcagatactgctgcggctaccagcacacaccagtgttgaaagcagcaagctttggaaggttaaggagcaagttgtgcatgaaacacttgaccctgccctgctaaataaagaaccgacatacagcctacagtgggaagaaaagagagagaggatgctccttgagaatttttttttgtgttgcagactcttcccctccccttcctcctcccaacccacccccagtccatctgtgatgcctgaattctttacaggctgtcttgctaaagacatcctagccttaatcaccttctctgtattgtgtatcactcctgtatctatctacttatgtcagttgtttaccagttcccttcagctgtctgctttttatcatattattgatcagtcagtcttgggcgtcttaggttggaggggagagagagagaaccggcaaagggaagcaggagtagagaatagcggtggcggacaatcagttaagatggttccaaaaatagctcagctctgctgatgacagctctgcttgcagccaccccgtatgggatttacgcacttcactaagattctctgctgaaacggattcgaccagctgctcctgcagttggtggtggctggtggcggcggtggcagcagtgggctggttacatcttcagagaaggaattggaagcgataggtttggggcaaggcaggctcccacacagggacatgagatttattatcagaggctattaggactcaggttgtggggcatctgtgttctttgtacactatgctctgggcacttggcatccagtttctttttgtccctatctcttttgaatgagatgagggagtaagtgatgagaaattgttatatttctcacccactgtgtctattttgttgctattgctctagtttattatatacataggctttttttccctactgcactttctgttgggagactcagctatgtacaggtcccaactttataattctttggtcttatccaagactttcatttgtcaaagaaactctgcaaagtggctgggtctaaaaatgtaatataagtaagtacaacattgatagagggcccctgtccctcaaagactctaagtctatgctatgtagaaaatgcagtgtttcttatctagtaaggtgatcctctcttagaaaaagaaatgatcttgcacaggctctcaggcttttgtaatcaagactccttccagccacaacacctctaattacagggtttttggcatcctgattgtcccccaatgtactatgtgtaggggcactgtgggggtgccctataatttgtcaagcttattatcttgctctggcacacagaatacactgaatcaatttttaaggtctctttcaaaatgtgtctacgtcatctaaaacccataaatattaaaatcatatgcactagaaacagttaagatgtttaaattttccagaacacagagacttaggaaacaggcaagacacaacatgaaagcaaaaaaggaaagagaatgttacttattctattatctgccatgatggggaaaggggagacagaaaaacaactttctccttataaatcccagcttttgctgctgcctttactataaatattgttattcaaaaggttttcacctccttcttgggaggctattcagtgaagtataagatataaagagcaattttattgcctaaatgagaagctggccaaagtgtagtttcctcagctccatgctcagaacatctgattcagtaggttgagttgggactgatatacattttcataagcatgtgcagtaattctgatgtagctcgtctgtggaccacaactcaggaaccctagtcttttaaatgtatatttttttaataacatggtgctctaatttggagccctcagaaagaaaggaaaataaaacagcataacctgtgtcctccatgatagtttagtgggctctagtattagtttatttcatgacatgtaattgttattttcatttaatttgctgcacaattacttttatgtataatccatgttgagatgtgaataggacaatttactttatttaaatactttcagcattggcatacctgaggagataatagactatgagtagggaagacatgggctgatgttctacagtgttccagggtcagccattttcttgctgcaagccggagaagatccacacttccttctattctattgagccttagagtggccacaaggagtatcagttgctccctcctttgaaggctggagtctgtgaaggcagtgttcaagttcacttgttaacccacatcgccacctactgtccaccccccatccttaattaagaaacttttgcctgggagttgggcggagattagtgtgagaggctacagtatgaatgaaaagtgagattgtgaatgcacctctatcgagccctattcagaatgcttgatttgcaatagtttattaagaattacagcattactatccttaaatctaaagtctctctctctttcagtccagaagcaaattacttttgggttagaaatagcagccaagttcctgttaaaatgaaaacaaacctctctccaccttgtgtctaaggccctctttgttggctttaaaatgtttattgatttggggatttaatgttggatccaactgtgaatagtggccactttgggcctggtgagtgatcctggaatttgtcaaacaagtttatggaaggaaacctgaaaatgcttcaccctagtcctttgcctctttatttttgtgggttttttttttttctctttgagaatgttttctatttgagtggagaatgctctcatatggtacttttctctgatccttttggaaagagcaagtgtcctttgagaaatacttgttcttggttgttccctgctccccacccccatgcctgtccctgccacttctagagcaggtggaagtcgcctgtgggttcttctggtctcaggctttgactgttcccctccacaaatttgttcttaattcgattttgtattgaagcacatcagttatttgggcttccatctttagtgaaaagccacctttgcgtgttgttatgccacattacagtgttccagaaaacatattggtgtagatgcaaaatcttgccttcataatttttagccttatgttggattagagagcatattttcaagttgatctcttggaacctcagcatgaatctatattagaagcccagagaatgctaaacagagttttcactgagccatattagataacaaattattttacctataaatgagatattaattatatagattagatttttgttattagattatcagctatggagtgatcaccaaggaggataaaatagaaatagtataatcttctttgcccccctttaactctactatctgtggaatatactgaactttttacaaccaagtctttaatgctctttactttccctagcaaatgttcttccatttaaaaagtctttaaaatacttctttattttagcagtgcttcagaaaatctatcttagaccattctatgcttttaaatctatgataagattaattaagtaggctaacaacctcacttaaaaatattacctcgttcttgtaacattaatttctacagatttttttattgtgtagaagtagatacatagatattcctagtaactatagtataatataaaattaaaatcctatgtgttgaatcattatgttaataatagctgccatttctggagcactgtgtcttccaggcctctggtaaacactgttgcatacattatttgtcttagttctcaaaataatcttgagaggtttgtactattctttccatcttacagatgcagaagttgaggcacatgaagagaattcttaggatcctaaattttcataaatgccttcaggggaatttgacaatcaatctccattaggatcacattctagtagttttggccaaggagagtaaaggaaaagcttgtctttcttgcctagaagtttaaaggtcaaatcctctctctagccatattgcaattctggggacagttcctattgattgggcacttccatctaatatgctgttcaactgagattctttctggccaagagctgtgcaggggtaggtggcctcagagaaggagctgctggaagggagaaaaaggtggctttgtccaaaagagatgaagctcataggcatgctgtgcttcataccctctactagccttgctcatttaggttatttgctgaaaactatgcctgtctcagggagaatagtgggtgctggagatccgttggtgagtggatgctttctcttccctcatatagcttaattgttagtgctagagacagatactaaaataaatgtactggtgcaaagttaacaacttgacttcataagagccataaggggaaattttaaattgtgtgaaaatatatgactagaagagctgctctattctgggatggccatggagcatcacgaaaggctttgctgagcacatttgtgctggacttagaatgatggctaggagttactaggctaagaaagagggatgtgccaaagatctttaaggaacttaacatgaatgtggctgaggaaaagtgagggatgagcttagagagtgtggaaagggtcagataatggaggacacagtcagtcgtgataaggattttgcttttttatcttaaaagcaatggagctcatgtactttcctcttgatctgcccaagtacttcagtcttcttttccccttttatgcttttcatctgtccaagctcttcagctgagctttcctcactgatgacagcactatctggagtgaaggaggtgcagatcctgagatggactgcacaccccttggggctggatggacagactactcttcgagtgagataagggatgcaagtgtaaagggcgagtatgttgcctcactcaatcacatgttcaccaccctctctgccaacctttctgcctcctgctacaccctgcctaagccatgctgaccaaccttgtcactctggcctcactggagcaagaaagtcttagaatgctggagggttccacaagaataaaaagagcccaccacatctgcatgcataaacactacacagctagctcttgcttatttctgagtccagcaaatattatttgagtgtttttacacatcactgatccaataaggaaaacttgtataaagactaatgtttttatgcttcctttatagaacatgaacacatttgaggttttgttacttattctggagcattaatgcaagatccaagaatatcagctttaagatttgtttttctattctcagaataggtttgaaacagagagcaaaatacctacctgtatgccttctttagtgacagttgtttctaaaatatctgtctttcttctgagagaactatttgagtagtgagaattaagtaggaatggacataaagagattatcatgaagatggttttatgatcatcactgtcattgccattgtcaaagaggcatttattaaatgccagatttgattttagcattgttttaagttctgttacctgaagagaattcaaaatcacagtctttgtcctatgggaatttcaatctatcaggcagccttgatttagaaacatttgaagaggacataaaggtaacaagaatgaaaagagattggatcaatatataaaaactgaaagcatttatattacttagaagttaaaagtcaaaacaaatctagaatactgttgggatagtcagaataggttaggctgtgttgtggtaacaagccaaccccatacctcaggagctagcagaatggagtttatttctcacttcatacttcatgctcatcacaggttggcaagagtatgctttgtgtcatcattgttaagggacctagactgagggagcctttactatccagaatgttgctcgtcaccctggaagcaggaaggaaatcaggtgaattctgactggctttgaaaggtttctatccagaagtgacactttactttcacattcgctccattagcccaggcaagccacacggtaatgcatcactcgaagagaattagtaaaacagtaaagaaacacttctgatcaaatttagtaattattctagccacagtaatcagtcaatctaattagatgataatactattagtacttatcagcaacaaaacatgtgctaggtatcaaatgctttgttaagcaattcacacacattactacatttaatctttactgacttatgaggtgggttctatcattatctctattttccacatgatgaaattaaaactgggagtctttaagcaacatgcctcaggccacacagctggtattttgtagagctacaattaaaacccacttactcctaatttaagagtctgagtgttttttcaagattcctatcatgtcacagaagtccactgacttgttttgatcgagctgagaagaacagactagagtcacttctgacctggccacttagaattattaagaagtgtctctgctttgctagaaatctgtctttggctttgttggtatttagaaccagatggatgatgatgatgattattattattattgtaaaccgtcttccacttgttttctatttcctttctttaagggtgttagtgaataattctttctttcacccgggttcctggagctccttaagaattaacttcccaggctctttcatgtttttctggcaccatcttggatgatgagggcttagaacattttgtgactatgcccactgtctggaaaggcttgtaggtgaaggattctttaagaaaactcagatacttttctcaaattcacttatgatgatgttttcccaaatcattttttatcaattctatttttggtttctctcacttatgaattgtttctgtctccttcattttggaacatttttctagttcattgtttttttgttttttcactctccctccagtgtctagcaaaagcctaacacacattacttggatattcatatcttaaaaatgaaagaataaattagtaaagtggtggattcagaattctagttgtttttcagctcctctgccttgattacctctcaccaagattttaacgaagagtgctatgttaacaactgagccacttactttctccattattatataattttaataagtttggtagcatgttttctcacctgtaaaatgagaataatgatagcacccatctttcagggttagaatgaggatttgataatttcatgctgcaaagtacttacgatactgcctgacacacagaaagtactaccataacagcaacaacctctttatcctttgccttgggaatcaaatattttctacagatttcacttttcaggttttctttgtacactgaattgtacctaaaatttcttgtgcctcctataagagttcatcccgaggagattggttgcattattaccatatatttagatatttatttcctttaatctggtcatttattatcaggcaaaattcacccccaatatttcacataggttcttttctattttcccgaagtgttggcaggtctgagaaataaagggaaagagtacaaaagagagaaattttaaagctgggtgtccgggggagacatcacatatcggcaggttccgtgatgcccccaagccacaaaaccagcaagtttttattagtgatttccaaaaggggagggagtgtacgaatagggtgtgggtcacagagatcacatgcttcacaaggtaataagatatcacaaggtaaatggaggcagggcgagatcacaggaccacaggactggggcaaaattaaaattgctaatgaagtttcaggcacgcattgtcattgataacatcttatcaggagacagggtttgagagcagacaaccagtctgactaaaatttattaggtgggaatttcctcatcctaataagcctgggagcaccacaggagattggggcttatttcatcccacagctgtgaccataaaagacagccgcccccaaagtgaccatttcagaggcctaccctcagggatgcattctctttctcagggatgttgcttgctgagaaaaacaattcagagatacttctcccacttgcttttgaaagaagagaaatgtggctctgttttgcctggctcactggcagtcagagtttaaggttatctctcttgttccctgaacattgctgttatcctgttcttttttcaaggtgcccagatttcatattgttcaaacacacatgctctacaaacaatttgtgcagttagtgcaatcatcacagggtcctgaggcgacatacatcctcctcagcttatgaagatgatgggaataagagattaaagtaaagacaagcataggaaatcacaagggtattgattggggaagtgataagcgtccatgaaatcttcacaatttatgttcagagattgcagtaaagacaagtgtaagaaattataaaagtattaatttggggaactaataaatgtccatgaaatcttcacaatccacattcttctgccatggcttcagctggtccctccattcggggtccctgccttcctgcaacaatttatcatctgtttgggttattgtcccagggaatcatattttggtaagacacgtattctttttagcttaaatacttgttattataatacaataggcttaatgactttggctccatgtatagcaatgttttcatttgttgatttgttcttttattcaacacatatttattgagaaaaagaaaaataattacagagactcttagagctagaaagaatcttaaaatcttttaggcgaaattcaccctcacttgtacagacgtaatactaagcatgcaaaaagatcagtggcagaatttgcttcttcagtgtcaaagtagattcaatgagagcagcaaaggaaggaacatttcacttcttttcatcttttccttgggtaattccatttccctcaataaagaagggaggttcttccatgaaattaggagtttctgctcctgtaggtttgctttagtattagttgaaacattttgaatcaaatatgaagaacagtaattcatatataggctgaaggacctagattttaagttgttatggctggccccaagtctgcattgacataaggaatgtctagagtacattctcaggtctgcagccttgcattctgatgtcaagaagcttgaatggtgtcacagaaagggtgtctgaagacatggtgcatctgtttcctgtggcttccaagcaaattaccaccaacctggtggcttacaaaaatacaaactctcttgcagttctggagcctggaggtctaaaatcaaggcactggcaaagttttagtccctccagaggctctcacggtgactccattccttgtctcttccagtttcaggtggtgctcagcactctttggcttgttgctgcttcactccaaactctgcttccatcctcacatggtgtttgctgtgggtctctgcttctctctccgtctaacttataaggatacatgtgattgcatttagaacatgcgtggctaacccaggataagcaccttctctccagatgcttaatttaatcatgccttttgtcatataaggtaatagtcactcttttgccatatgagataacatttatccattctggagattcacaggttctggggattaagacagggactcatcttttccaggggctgccattcaactcactagacctgaatttaagttcttgttctttgactgcctttccatgattgggcaagttactgcatctctccaaaactagggtttctgctctgtaaaatgagaataataacgcctaatttacagggttataataagaaataaaagtggtaaatatatgtatttatatatatgtaaagttacctaacccagttcttagcataattagttgctgtagttccaggcattcaatagatagaacagattttaaactactttaaagactagtgtgaggctggcctatacttagttaagaatttgttaaagtttgatgatttggttgaaaaaatattctggagtgtgatggttaatccctctggagaaccctgactaatatactgagtaactacaaaatgattttatatttagttcaccattatacatagaatagccacaaaatggttttatattcagataaccattatttgttggccatgcctcatttaataatatttcctctgtctgctttccactgcttcataaccactagcacattttgaaacatattactatgtgatgtcaaattctttaaataataatgagttttagtttgagtaacaaaccagtgatgtctgtgatgtcacaggcctgaaaaaaaaactgttgcaatgatcttcattggctaaattaaaatataaagagtagtatagaatttatcatccacattttacagaattattgtttgagtcatttagggtttctattccagtctcttaattgaactgtactttctatatctgcaagtcaaaacactcatcaaaaaatatgacttcaaatatgatagccaacttttgtgttactacatagtgttaattttacagttttttatatgaaataactctctgagttaggagacaagtaaagaaatgttgccaacactcatagatatgaataacaacgtaatttaaggcatgttgcaaaacataaacttttaatatatccctctataaattcttacttttagtattcttaattctcagatattactccttttcatatgattgcatttatattcttgtttaattctctcttttttctacttatatgatttcctccccactgacttctgctcctccttcctgcttatagaaagaatgttgacctcaaatgtctattattttttcattcaatgaactacagtaaagttgatgtgtaggtgacaattagtgtaggcaaaaggtagagtaatgttgctttccaggtatcttccaactctaatattctgtggacttatatacttgagagtattcattctgcgtgtaagatctcacacttctatagctgatacattataatctgcctatgtctctttttatctgatctatagaaaaaatattattttcatatcttcatatgtttttgggttaccttaggctattaaaagaaaaataatgaagatgttaagatatttcaggacagtatgagtatgttggggtgtgtgtgtgtgtgtgtgtgtgtgtgtgtgtatgtgtgtgtataaaagattttactttttactcagccaacgctttagagatcttctgagtttccaagtaaatttatttgcttaagatgtgtctgtttgctttcatacagccattccacatcttccaagaaatgacttcaagaacatctgcttcagtactcataaacatcctatctgctcatcattttcattcttttacaacactcccactttcaaatcacatccaaaatggcaaaaagaacccaaagctaacatgattttagatgtcaattgtgtcctctctgtgaatgttttccatatttgaaatggctgtggaattatcttgcctctacccacagtaattgagaatgacaggaattggaaaagggtcatttcctctgtctcctgggattctgaaagctgtgttttcttttatacctgatcaggtctgccagttgcaaagctatacaatgtagtggagaactgcatacggttaattatgacaattacaatcagttctttacaatctctgctgctgttatgggatttaaataccataatgtatgtcaaaaggacaaaataatgttcctatgttttctgcttacagctgcttttatgattgggttttgctcataaacaggtggttataaagttgcaatccttccatgaattcctttatctttcctgtctcctaacctggcttccctggtgtgtcattgaacacaagtgttgagattcctagcatctctgaggtgatctcagatcctagacagtgtcccttgaatatgctgcaataaaaatgaaaccacttatggtcagcagaagtaggtagatgaatttagttaattctcaaagtctcccttgctacttcagacctctgtggtttgccttcccactgcgtcctgcaccttctctctattttctacctttgcttaatccctactttttcaattttatctcagtgaaacactgtgcctagtttcttctcaccattttggtctccagctcatagcatgttgtgaagactattgcatgcggacttgaatttatgtgctgttgatacttgggtacttgtctctgatgttacaagttaatccatacagtgcacatgtggtccctcactgttgctcaaggcagctggaaaataggtaaggtaatctttttctttcagcacaccttccgtctctgcagctcttacctctacctgaaaggtaggtataaagagaattatggccaatgaaactccatatgagagccctcccctcctccccagagtatatcttgcttaaacaacacatttacggttaatgaccatctggtaaaggtgacagcctttagtcctcctaattcttaactgtctgaaaaaatgtgcccaacctgccacggcttgtgactgaattataaaccatgaagcataataaagtcattaagtttcaacatgtcaaaatggactcaaattgcatcttgcccagaatttgatggcctttccccagcacttaagagagcagggctgtgtactgttcaaaaagcactttgtcatttctcgaagtactcttagctttgtgtggctgtctggacacaagcatcagcatctccaggagaaggaggaaatcgagtgaagtgagagcatggaggggccagtatgccacttcctagggaaaggcaaaggcatttcttctcaggaaaagagcagagaatgatgctgtacctcatttggttattgctcaccctcctgaatatatgattcattttacagtgggaaaattttggataaaagcttgtgctttacaattccgattacccttccccttttatcccccactatcaaaaataatcatattctataaacgtcagtggaaagtggtgagagtgcaactacgttttggagaaccaggtgtcagctctgtcagatttctatgaataggcacatctatatacactttttcaaagaaagaaaggtcactcgccaccctacttgtaaaactgtcagaggatttaggaaagaactaagttaggctgtcttttcacatgggaaaggaaatctggttctcaagatatttggggcattgcagtgaataagggatattaatagaattccacccccggcctctggctaagaacttatctgcctagaatctgaggaggaaaggaatctaagagttacccaaggctcagtctcactgcaataggaggggataacactgaacatggtggggcagatgtgggctttggtatctgttgctagtttatcctcccttcacccaccagcgcagtactgccatttcttctttcccctggaattctctatgtttagtgagcgagtttaagaatggaggatgctcagggatcttcttctcttatatagagactgggataatttgagtgttccatgttctgacacaggtggcatggatgaaggggtgtcactgaagaagctttggcaaaagctgatttacctttccaaaggctctgtgtcaggtgctggataaccgttaaaagaaaggaaagcaagccctctggcggctggcatgcagaaatgcacctgctaagccaatgagccattacaggccgtgccttcagattagagaaggacatgtcaaattagttggagagttttagaatactttatttattccagcttgtacatgaagttatcgatgcatctgctactccaagcatgttcagatgaaataatagaagaaagtctttaaggtattaaggttcatcttctgaaattgttcaacacttcttaaactgcagcaggcccagttgggcactgatagcaacttaagttgtcattactttgtgggattcagatctcgagaatatttatttagtgagagggagccagcaatttgtttctgtaggcaaaaggagattacagaagagagaccccctttgttgctgaattgagtagctgggaggagttgctggaagtgatgaatttaccccaagccatgaaggatgggtaagattagaacagataaaggaaatgaaagtgaacgtttgaaatataggggccacgggagcaggagtgggtttgtttttgaagtcagtagcaagcaagagttgagagtcagtggtaagtaattatgcacagagaaaacttggcaaatagataagaaaaaatcacattaatatttaaagtggtttaatatcaattgaatcacaaggacatcttaggtattcattatgaagctagagacagtatagcctctggacttaaggagtgggtctgtattcaaatcgtagttctgacacttctgagagtcctcaggcaagttagttagcttctctttgaccatttttcccaatctgttcacttgggatgagaagataatgtatctttagactcagatacacaaacattatctaaatccaggatgtagaagttgagtgcaaggaaagtctcagttgtccccaggctgcatatcattcaactggtgagtttccagctgctggtgtgcacaaacagaagctgaaggaccaatggcaggagaattacaaggcaagtttatgaatcagatggatatttggaccagatgacacccaggggccctccaacctagaggtctggtagttctaaaaattccatgatgtcccacaagagctaactgagatgtggggataataatgacataagtttacatcttacgctaaaaatgttgtttaaatttagttcaaaatgttctgttctatgtgaaaaaaatactatcattttatttaatgcaacctatcactgaaatgactatctcaagctgtttctctctatctcgtggagggaaggagtggaattgggggtagggtgcagggtggaaagaaaggagaggtaatactgttacccagagccaacatgttgctcttcaaaggggcttcagaaaatagaacaaagattccagcctgaatgagaaaggaggtggagagtttgaggaacacaaagctttaagtggaatttaccccatctaattatttgcgaaggaaagggtggaaagaaatgttgacagcaaagatttcatggagaacaggaacaataagaccctgtgccagagcactgtattctttgatgtaccacatatggagaagggatatagaacttgagttcagcaaggtttaaaaggcaaaatgtaatcacttccctttaattaactcaaacaatgcacggcaggttatgttaatgtgcctgtagctgagatagaggcagtaggctgccactaatacctgagagagagacagagagagagagaggaagagggagagaaagagaaagagaaagagagaggctcctgtaatgccagagcaggaagggcctagaaaccttatagactaattttacagatgcgagaacaagcctagcaaaattacagaactcacccaaggttatatggtctctcagtgacaaagtgaccataatacctcaggcctttaccaagttagtattctctctaagacactgcatgacggagtccatagtgatttcaagttagcccaggggttaaaactaaccatagtacatttgaatacggattaacatttggtgtgtcctttgaacaaaaggttaaatagaaaggtaaaatgtagaaaggtatctacacgtattcacttcagtcaagctttacttttaaagttgctttagaatattcttattaaaaccagtggtgattttcatgcagctgttttaattaaaatgttgtatgttttttataaacaaagtgatgaaaatttctggttatagccttgtagaagactgagcagggaaaccatcagaattgcaagtggagcaaaaatgttataatttagatcatgtgaccgaaataccaccaccgctgggtagaatctgcttaaactgcagctttggatttttcaggggtaaacaaacctcttatgaaaaagaaagccatgcattaaaattataaaggcacatgaaatattacaggaaagaatgagaggaagtaaagaaaactaacattcttctgttttactgctttcagggaagagttttatgaacagtttccaaaagtgttcttaagcggttgtaggttttattttgctttacaatttgacagtattttaagattctgtatttattctctttttgagctgaattatgcaggactaaacagatatcttttgtaaaaccttttatttccctgacagttaggagaaatatgaagtaggaaattctttggtaattgttggaggttggtatagtgcagtagataatgtccctttactgaatttattatcaaaatacacaagtcagagggaaggagatcaaaatatagcttctatttggtgatatactggtaaatgtttaattttcttccttttagaagagaggagactgatttatagtgttgacatatttttacggtataaatactccctccctggtgaaattcaagatgccaatgggatgtcactgaacttgaaattgggcagaggttcatatatttggctcttgcaagccagtgcaaacagtcttgggacagcactgcctgagtgcatcactcgtaaaggctgtgttagagagtgtggcctagatctcatagattagcagacttgttttaatacatcacttcagaatcagtcaaccttcaaccacaggtcttttcttctttggatgcctgtaccggtaaaactttcagcaagaaggagcaaagcaaaaagtgtgcttaccacaggcaggctggcagccaggagagttagtcgtctcccagactctaccaatctgatgaattcacaatctgaatcaagctggggaggccaggcatgtcactcagatggaaggaaacaacgaaagtgagaaataaatgttaactcttagcagcatcagaattcagaatgattcttagaaaaatgttacagggtttgtgtcaacaagaaggtcagaggcagaactgtattttaaatatccaacattttggcatatagctattctagcaaaagcatctttgaggctgtcatgtggcaagaattgtggttatcagaaaaaaaaataggagtttttaggttacacttaaaatataaagaccttaatagacctttattttatagaaagatatggaagaataaatttatattcagttccttcaaattaaattattttttcaactgggtgtaactgaaataaatagggcagccatagtaattttacttaagcaacttcattgcctcagagagcagatgatgaactattttagtgaatatatgaaatgatatctggcaagagaaaaatacttgatcatctcacttccttctagttgatgttcaagagtccctgcatccagatttacagctctttgcttacacatccatcattgttaatatgccaataccctgacgaagcaagcctggtattggctgcatgagtcagtttttcctggtagagagtggtttattattcttgttgctgctgttgtagtattaacatctgacaatttgataattaacaatgattataaattagcttattactataatgacatgagtctaagtggacatttgatatagcttatttttgagtgtaaaaattctggttctaagtcaggtgtctggaagtgttttgttattatcaccgtgctagaagataaaatctgagttctgaatcaacctactttcttattctgttgcctgtgacattgaatctcatgttcatatgttcatgtgttttatgttcatatgtttttacatttgcttccctttgttagaatttctggttaggtgtgacccaaaactcttaagtcaggtggaggagcattttaggactggctctgccatttaacttaaataataagttattaagttattataacttaaataataagttaatgaatctttccaaatctgagctttctcatatataaaataagaatgctaatgcatctacctcctaggcaccagtaaagattaagtggaatcatgtatatagtgtgtaacacattttgtgtgtgtgtggttagtttctttttttttttttgagtttgttttaatttttagctttctcaaataagagaacatgtgaagtttgtctttctgtgcctggcttatttcacttaacataatgacccccagttccatccatattgatgcaaatgacagaatctcattcatttttatggctgaatagtactccattgtatacatgtatcatacggttttttttactattatactttaagttttagggtacacatgcacaacgtgcaggtttgttacatatgtatacatgtgccatgttggtgtgctgcacccattaactcatcatttacatgaggtatatctcctaatgctatccctcacctcttcccctaccccacaacaggccccggtgtgtgatgttccccttcctctgtccaagagttctcattgttcaattcctacctatgagtgagaacatgcggtgtttggttttttgtccttgtgatagtttactgagaatgatatcatacattctttattcattcatctgttgatggacacatagtttgcaggggtacatgtgcaggtttgttgcatagctaaatatgtgttatgggagtttgttgtcagattatttcatcacccaggtattaagcctagtacccattagttatacagtaatttcttaatacatattataacatttgttaattgtataagttaaaaattttattactataatatttgttaattttataaattttgtatgataaaatacgtgtattacattcaatgcatggctacaattagtccacgtttaaggactgactcactttctagaatttggcaatactatgtctctcaaagttttcctaatgaaataagctatttatctttccaacccacagctcttcaggttcacatctatttctttgctttctcactgccctgacttctacccttccctttttgtctccctagtacccaaagtcctcttccccactgcacctgccattcttctccaggtgaaagtctgatttaggaaaagtgtatgagaaactctcataataaagagtgcatttgtattcttaaagcattacagcagagctaaagcctaagagtataatttcaatattcaggctgtgggtaagagaggtatttgctcagccgtagattccttttgatgcctctgaaatcactgtcatatctgtaactatctattgtacagtccatatggcaacctttaattatacctgttggaataatccacttagccaaagtcaagcatcctctgattacgtgttctcttgttatttcctagttgtcatatatccttggcagctgtcatcagccgaatttggtgtttctaatttttagtagctgtcatcctgtcccaagtttctgtaacacatgcttcggccttgccaaacatgatttgctttaacagttagtcataattttttgggccttaccttggcgggctagtggtcacattttactgtaggtgatctttacaagtgacttcagctccctcttctagctttacctttttttttaattgcacaaaattctatgtagcatgtcaatcgataggcaaaaaaagatctgttagcctccattacccaagagtgggccatatttcagtggtaggtaaatttggtccaatagttatgtttgaaatgccaacaatgaataaattaaattaaaatttattgagcacctacagtgttatagttatttgcttgctaatttgattttaagtgtgtgtataagtatatgcatgtgtgtgagtgtgtataatagaggctattcttttcaaggtcatacagctactaagtggaaaagctatgaattaaatgaaaagtttcctggctaagaagtccttgctttgtcctcaaaataggtttttgctaagcctacattagttagaatgggaaatatatatagagatatatgggctgggcacggtggctcacacctgtaatcccagcaatttgggaggccaaggtgggtggatcacgaggtcaagaaatcgagaccatccagggaatattgtcactgaggtggagtaaattaagcgtatataaaaatacaggttgagtaaggttatgatagctactgagtaaggttatgatagctggccaacatggtgaaaccccgtctctactaaaaatacaaaaattagctgagtgtggtggcacacacctgtagtcccagctactcgggaggctggggcaggagaatcacttgaacctgggaggccgaggttgcagtgatccgagatcacgctgctgcactccagcttggggacagagcgagactgcatctcaaaaaaaaaaaaacatacaaaaaaggtatatatgactatagccctttttcttcataaggtttatagtcttcaacgatagagtgacttttatgtttttctaccagaagattcgaagttttgtagagacaaatgtttatgacattattactttggtaaagttcagtaaagcaaacaaacaagatgaaaacctgcctgctgagggttggttaatctcttctgaaaaaggtacactttggtataatgattcataaaaagcatgtggacactttacagctttacatttagaataaaacctgtaatcccaatgcctgttctatgtgttatacctgtgttttcctgaattatatgtctgtgtacctcctctttatacagtgtttcatctaaaagggtggcatttactgctagaatttgagatcatgaaaaggaatgattttagcacaaaaaaaactaaacctgttttctatcaaattctaagaacccagaggcaatgaatgctactgtcaaaaataatttgaagaaagtgtatctgacagtatttttcaaatttagctacaattttggttttactttggggtattgctccagtggagattcgttcatgattgtataccttcctagaatatacagatttttcttattaggcattctaaggagagcttgttactgacattctgcagaactttacagtcatagtatttcatctgtaatattatcttatagaatataaagattttcctgtaaaaatggaagtgtccccaagcctgtgtttctagtcatgtttcaatcactaagtagctttctgacctggtcaagccactttaccatctttctgggtcttctttcctcattggtaccaagaaagggtcagagtatttgaaccttaatgtctcttcttagttccaccatgttgctatgcacaaccctcatccactgcttatgactgctgtgtaaaacactccaacctcagtatgcctacaggcattccacaggaggtctatgaagcttttcacagttgcaaagtcatttttcccctttggaaactggacttcaataccattttggttcaacatgtgttttcttacactgataacaagaatgggggctcctaaaagcatagatgttctttatgacatcaacctcgaaaatgtaaaggatatattcaaaatataactcctctaaagtaagtaaccatttatccaaaaatttagagggtatattcaaaatataactccccaaaaataagtaaccatttataaagtaactaatgtaaatacttctggattctaaaatgtatattgggttcttgggaacttgaaatagcaattattttataaatcctttgtaatagtcaatagcaaagtaagatcattgatgtgtgtttactccttgttgtctcttcttatacgtttttccagaggatgaagttcagtacagtaataaagtaaaattaaaaaaaagctaatgtatttgtagacttctaaagtcttcaaatatttattctgccctgttgagtgtcttatggataggtaatattatctttaaaggtgatgctcaactttcatgctgttttatttgtttttttcttgagacagagtctcagtcattctgttgcccaggccggagtgcaatggtgtgatcttggctttctgcaacctctgcctcccaggttcaagtgattctcctgccttggcctcccgagtagctgggattacaggcgtgtgtcacaatgccaagctaatttttgtatttttgtagaaacatggtttcaccatgttggccaggctggcctcaaactcctcacctcaagtaatctgcctgcctcagcctcccaaagtgctgggattacaggcacgagacaccacacctggcctgtgctgtactatttatttttttatcccatggttacatatgttatgcaatgaaaatgttttcatgctacacatcaagtataaaactcttcaggccagactcctatacagattaagatggcatatatgaattgttttttttttctttctcccaaaggcataggttaggcatatttactgtctttgccaggccttttctcactttttaagacatccgaatgtgtagatttccttccttttcaacatttacattggaagatgaacatatttagaatgagccaaaagaaaaaatgctgcataaagcagtgttgaaggaagttattctggcagtcttagggttgaaattcgcaatccattacaagcatggaagctgtagagccttggatgaggctctacaaggattgggatttgtagaaatttgatgcgtccaaactctgtaattaccttaaagaaatccaagctttctgcaattaaaaatgtgtaattaaaaagtcatccagtgtgtgtgtgtttgtgtgtgcgtgtaatttatatccataaatatgcatctactatgtgaaacatctcttaagggatatgaatgtatgctgaaataattcagctagtgtaaagagggaaggaaaaaataatttatattactgggggaaggcagtcagatgaatataaatggggaagcaccatccccagcagagataataggttgagaaggagctataaatagggaaaatctgggtgtgtatggaaaaagtgacttcaacatatgattaattagaggtggtggggaaaacaatcaaagaaatatcaatgtgtagtaagtaaaaaatgtggaagggtggtgggtagaggagcaaagtatagtggaggttactgaatgcacagaaaaataattaaactcttaggttatacccttatccaagattctgaattagtttcttctactcagcttttccggggatggttagggcttctacagataggaagtagaatgctgtgaaaagaaggtacacttacgaaggaaagtttctgaaaataaaccagaaaactaatttgctaggggagttccctagtggcagagagtttacaccatgtgttgccctttctctctgcacttccaggaattccatctgcagaaggtgagtgacaggccggtggtgctggtaaagtctgtgctgaggcagtaggagagctgatgtcaatgacaaggcaacccttgactgcagccctgacacctgtctggggaatttagactttagtgacaatccttgacctgccatgcaaatctggagctataccattgaattattgcccgtgattgggtgtggaaatggagagctttgtgggccaggaagcaggcagtttgtaatgtgtggatttttagcccggcaagctagatgttctaccttcactagagtaattttaattcattctcttctgaagaaagaggtaaagatgaaggttgtctagggaggaggaatctcaatatttttcttcattaggacagttataatgttgagaccaaaaagatgtaagtaaaggtaattaacaaagggcaatctacttcctttggagcttataaattcctcaactacttagaaatgctactctgtctcaccctgacatttgatctttgtacttcagataggatttgacgtacgtttaagttctcagtggactcaggtttccggaggacttttttgttaactgctgattgaacctttattctgctccacatgattcctttgccagcttgtttgaagtgtttgttcctggtggaaccacaacaaatatgtgagctcattttctttctattaggtaaggtctttagagtttgggatttcaagtattcagtgtttcatgccttcagtgttcttttagaaatctgtatgtattcctacatttttcacaggcagtaatccagagaatctgatatggtttggctgtatcccccacccaaatctcacctcaaattgtaatccctgttatccctatgtgtcaagggcaggaccaggtggaggtaattaaatcacaggggggcggtttcccccatgctgttctcatcatagtgagttctcacaaaatctgatggttttataagtgtctggcatttcccctgtttgcaatcactttattctgccaccccatgaataaggtgcctgcttctcttttgccttccaccatgattgtaagtttcctgaggcctccccagccttgaggaactatgagtcaattaaacctctctcctttgtaaattacccagtcttgggtactccttcatagcggtgtgagaatggaccaacactggatcaaatctggcttatgtaaatctggaataaagagtaataaaaccaaccagatgctaataatatgacgccacctcttttctcccatccaagatgtgattctctagattttccagtctgatgatgttgtggagctcgcagttgacctgtatcttcttgatataagttccatgtggttgagcttggcgtttataacagaacagcaaaaaatgggatccctttcatcagaattcccctctttgcccccacactttgtagcaattccctgtttgccactttcaactctttgttgatctaattattggtatgtctacccaagaaaatcttaagcttatttggggactgtggtcttgttatatatatcatctcccgagatactagaatagcttaagtacccaattattattcagtaagtgcctgtttactgttggactttcttgaaaattcatatagaataccttcattttcttcacactttggtctgtaaacagtgtggaagtagtgaagaagacacaaagtcactttagacatgtttattactctcacttttatcctctcccctccatcagtgaagactcctacttgccatctttcctctaaagatccttagtccctgagaagcaagagctactgaagattatatcctaataagtttctaaaactcaaaagttttggtaggaaagaacatgtaggcttaattcctttctctttgacagtttggcccaattggatgctcaggtgtaatatgctattattagccctgagatgaaaatttcagggccaaaattattagtaaaacacttaacatttattaaatttttacagagtatttaatgtgtaaatatttactgcactgggtaccttatatgcattgttacatttaattctcattataatgatttattagctattacataggtatttttactatcatccttatctatacggagagtgaggcttgatgggatcaagtaatttgccagtgtctactagctcttagatagtaaattcagcattcaagttcatgcttaaattctaccctctatgccctccatcttatataaaccttaactccaggaaaaacttacctgtcttgtactaactgtcatatatttggtaggagaggcaaggagacatttttctaatcacattctttcagtatgtgttgggataaatttcaggggttggaatttccatcaagtgcacatgtacacctcttagaattgtcactttaggttatgacaactaggatgcattttttaaataaaagaagtgtattttgtatatgtattatatactgtattcttacaataaagtgagctaaagaaaagaaaatgttattaagaaaatattaggaaatattaagaaaatgttattaagaaagagaaaatatatttactattattacctgaaagtggatcatcataaaggtcttcatcatcattgtcttcatgttgagcaggttgaggaggaggaagagagaagttagtcttgctgtctcaggcatggcagaggtggaagatatggaggaggtggaaggagaggcgaaggaggcagtatattcagtgtgagctttattgaaaaaaatacacatatgagtggacctacacagctcaaatgcatgttattcaggggtcgactgtaccttgataataacatcactgccattaccgtattctgagttggtggtataaatggcatttttctaggtgatcgttatatatgtgtatcatgtatattaccaggtatagtcctgtaatagttccacctttctgcataaaagtcttcacaaagctaaactgagagttatagtaactgtaattatggaaggtaatcacaacaggaaatatgttatatgaaatacaacttttacaagttgttttacagtttgtgttatatgaaataacaattataggctttgttattctgaacattaatttgcattagccaaacaggagattcattttaggaatatttgtatctgtctactctttctattatctatatataccaataaacattgacaaacatttaagcattagaatttttgtctcaattgaatgaagctttcaaagatgctttttcttttttcttggaatcctgttgaatttccttgaaaaataaataagagttcacaccttctcagagtttcctctgaggtgttttgatactgttaacatgagcatcaaagtaataccaactcttaaaacacacataattacttaactatcagtgtatttctaagaaccctgtcatatgcacccttcttattttatgctcatgttgtaaatagacatacatgatgctgtgctgtcatagagaaaccatccatgttcactgcttaaagaagtgagtgtgagtttgagtgtgagtctgtgatgtatgtttagtctgtaataacaattctattaattcaatactgttttaaacatgcactcacatcctgtcatcagtaaaaccaagtgtcagttatccacacaattaatcaagttctcactcaggctttctagtaattcaactagtttcccatttccttatttcttctaggtgacatagttgcttctccatctgtaaagccagtataggatattttaattatttagttagcaatgtttttattaggcactcttttaggcactgacgatattaaagtgaacaagacagataagtccctgtttccatgtgaactagagtttacattccagttgtactagtaaacaactaaaacctctacataaggcagtttaatattgaagaatgtcctgaggaatatgaatcagaacaatgtggtagtggtgtggtatacacatactatttacttagggagacctttctagttggtgacttgaacttacacatgaatgagaagtagctagtcacaagaatatctataacaagattgttataaatagcaaagatagatagatagatagatagataaatagatagatagatggaaaaagccctaaagtatgaatgagcttggcagatttgaaaaatagattgactagtagagagtggatatttgcgaagatttattactaatgatagatctttaaatatccacatagctttaagggagcagtaaatttagcttaaggttagtaaaatgttcagtaccagcaggatatccctataagattttttaggattacagaacttggataaatggtaaattggatcaacatcatgccaattaaatttgttgtatggtctgttttattaaatctctaattcgtatttatataatgtataattataacttgctgcttatacagaatggttacccgtttagtattttatctgttcaacaaccatttactaatgtcctatcatatgcaagatagagtactaggggctgagtatacaaaaataaataagaccactctgtcatgaaaacatgtacaaaaaagtagataacacaggatttaaatatatttagtgggaaatatgttttctcagtttaaacatataaaaattataaagtggaatttcagatgagagtggcattgatagatataagtaggcatagctgatgcagagaatgttaaaatataattttgcaggtctgaaaaaccatttgacatttccttgtaattctggattaatgcttatatgattatctctgccacagtggaaaagtttataaatttaaattaatggaaattgctgttgatgaaaccctctagaggataatacatttctgatatgcctatagggctccgtatttaagctaaactcctgcccaagatgcaggatgatgaagtcctttatttcggccatcagacctattaaaaccacgagtatccctgtgagtccacaagtcaggctacaatacaacatcctcaatctgacaagaaaatcaactgatttactgaatttatatgaaccaattcttatatgcatgacagccaaaaaagttccaaaaagaaaacaaattttgcattagtatgagattttgaggttaggagcctacgtttagaggtttatcagttcagcccccgtatggagctatccagggtgctgaacgtgctctgcaactcagtccccttagtctctgggcttgacctattttttccattgttgtttcttatcttcaccttttattccctacccatactgcctgctctgattgctctttgtatgatctcatcaatcatatgtgacagatttttgtcccgacccttgctatgccctacattctaacctagtacattcttcaacccatgtttagccaaatttcaattaaaatttatacctacagccttcccaacaagtgccttgactctcaattttgtttcttgaagcaatgagatcattgatttgatctctaattataaagtaattaaaaacaattttatttcagtccacaaatacataaatattctaaaaaggagcctttaattcatttaataatccataaaaataaactgaaaaatcaagcgtggacttctttgtcactttcctctttttcattgtgaccttctctctcctcccacttctccttcctcctcatcatcattataaattcaatgagtcagaatggtttaattgaaattcttcatttaaaaagtaggatcttggtaaaatgtaggttcaaagacaattttacaatagtttaaccttagtagatgaaaaatagtaaaagtataaacaactcctgtgaacatattgtctttgaaattggtaaaataaataaaattgagatcacttcttactgtacatctccagcttattttaggatgtatctcttcctttctgactggaagactcaaaatacatttagagagttggagctggtgttgacagtcaatgattagggcaaaagttttgcatgtacttcacctctgtatttctccctaatttcatccattgtaatttaagaagaaggacatgcctgaattgaaaagttcaacaagtgaacttttgaataaacagtgtagatttttatcttaggtccaccaatccctaaccatgtaatcttgggtaaatctttaactctatggatctatattttttaaatttgcaaattgagaataataaaacatcctcacactgaagattcctgccagaattatatgagataatgcatatccaaagtttagggcagaaactgaaacctagccaacattttaaaaatgtgaattattgtcattaacttatcctttcggtgcttcacctctccatacattttaagatactctggtcattatgagtacttgccacaagtatataggagataaaagatttattttcccacccattattaggttcatagctgaggtatcctgtaataagagacagattaacaggaaaaaaagcatacaaattaatataatttttatgtgacattggagcctttgaagggaagacccaaagaaacagggaatcctgtgtattttagactttggtttcataaagagtggacagtcttggggaagtatggctggacaaaagtgggcatggcctgatggtaataagctgggggaaacttagcaaggcctattgttcagattcttcctggtgtctctgtgtgttcagctgctttcctctagttctagagagaatacctctgaatgaaggtctttatgatttgctttagatgaaagtcagaggattattttatggtctgcttcaggggagaagagtgagagaaagtcaaagagatctttctgcttctgctgctttctcaaatgccaagttgctgtattttggggtagtatgtcctgaaccccatcaggtacttgacatttcatgaaggtaagctgatcaatctttcatccatggcactcattaatgtctcaatttgaaatgttgtgagctatgaaaaaaagacaaggaaggtagtgcttatctactcatgaacaaccattattaactcactattaatcattgattacaattgatctattggccatggtattgttgtgaactttgaaatatattgtattaacatttctatgaaaatggtggttgaaattctgcaggcagataatgcagtgttaacataataagtaaaataattaatgatagtgaagttgtaaaagtaagaaggttcaatgtgcttgaaagtcacagaattttgaaaaatgcaagagataaggaaaactgatgaacaaaatgtgacaacttgagactggctatgcatactgaaatgaaccagtgacttttaaactagaattcttagagtgtacagcctacagaaatgtaaatatggctaatacaggtaactttctaatttaaatacctatcaaagcttctgttggaagaaaactagatttatacattgtgacatgctcaaaatccttgtcttctccaacaccatctccagtaaaatactcctagcataaaatttattaaagtgaatatctctgaaattaggttcttttggaattaaacaaaagagaccatggttttccaggcattgttgtagatgtcactttataataagacagataaggcagtcagtatacagaggtttggttttatggccagaactaacatttattcaatcaatgagagagatcaattagagcagcattacttctacagtgggaaaatttcagagcccctgaaatagaacattattgttaaattatcaaatatgttacagttgttgctagtataatgaccctttctctttatcagaatcagggaagaaaaaagccaaatggtgactaatttatcaccaggttcataactaagttaccaaaagactgaaactaatcaggtctgattttcaaaataagcaataacatttaaagcatatttgaatatacagatgtttggatcactgatatcctaagaattctatagtctctgctgattttaaagtcgagattagattgttcttgtatacccagagaagcatagctctaaagggaaggtgttctggggaaagaaaagaaaaaaatgacgttttcatcatcacactgaaaaagtgccaacaaatcctaagtaattttgtgttgattatactaaattagaatagtgatggctataatcatttgatccctgaggcattaatgaaaaatcagcattattttgtgtggaatatgtattattatccttgagcttaggaatgattattagtaagtctgattaaatctggaagcagtgacacaagctatctttaacccaccaatgacagggctatattgtaaatttatgatgaatgaacacagtttagcatttttagcacttgttggggaaaataagaagtctgcattcattttcttgattagactgcaaagtagtacagagaagctcataaaaaattcttcataatgaaatagtgttcctactgatagattaacctatcatagcttccaaaattcacaggactggttatccttgtatgatcaaagatattattcagcaacattctggagatcatgaattcctagatacagaagtataaacaataaaaatactaccatgttgcatgcatgtattaccttcatctttttttttttttttttttttgagatggagtcttgctttgttgcccaggctggagtacagtggcacggtctcggctcgttgtaacctccgcctcccaggttcaagcgattctcctgcttcagcctcccaagcagctgagactacaggcacacaccaccatgcccggctaattttttgtatttttagtagagatggggtttcaccatgttggccaggatggtctcgatctcttgaccttgtgatccacctgcctcagcctctcaaagtcctgggattacaggcgtgggccaccgcacctggcagtattacccttatatttttaaatgctttcacatttactttatggtattcttatcatagtaacttaagtgagttagactttttaccacctgctctatcagtaagaaaactgtagcacaatccagtggaggtatttgctaaaatcacacaggttgtcagaaataccagtattggaaccccagggtcttggtttcaagtctaatatattttctgggcctcagtttagccattaattttataattacagacaatgtttttgctaacatcttgaattctttctttttaaaaagatgtctattctgtattcatagaaaatattagagattcttactgatcaaatggatcacagcaattgtttaattttaattttcagtgctaggtaatggagctcagaacacactgactcaaaatttggcatttgaggaatcagcagaaggaggccgtagaaacttgaaaggaatctacttgccccttcttccctgaagcagtcatgaaagctaactgaattttcccagaaaataggtcataagactattatatcagaggcgttcttcctgtacctggaggaaaagaatgtccttatctctgaaaacatagggacactgaaaagaatctgaacaagtaggccttgccgtgttacccccagtttattaacattagattgtactcttttgtcctccaattatacttccatgcacgactgtccactctttatcaaacctaagcataaaaatacccagatttccctgtgtcttcgggccttcatttctgaaggctcctgtgtataagttttatataaataaatatatgcttctttatgaatgaatataaattttacttaatataaatttatgtaaatttaatatttttataattataaaattacaaaaatgattgtaattttaaatcatatataaatttattataaatttatatataaattttaatataaaatatacttaattttacttaatataaatttacttaatataaattattaagtaaatttgttttctcttataaatctgtctttattacaggagccttatccaggaaccttgtgatgtatgagtaatctttctcccctgtataggcaaaattgtttctaaaatccccatataatttagggcaagttctgatccttgcatagtagcatctgacactcagtagtaacttgattaaatattagttccttttttcctaattcccaccccaaatgctgtgaccctctctgcactcaaaagacaaaatctttaaaattcttagttgatctgaaatttgtgttgatggcctacattattttattgttaaaactatgattacaggtgactagtcagtaacaaaacataaaaattgtgaaagtacagccaaaccctgttttaaatgctagatggagttagtgttttgtttccatcaaagccacaatatttctacttgaaacataggccagggcagtggctcacgtctgtaatctcagcactttgggaggccgaggtgggtggatcacctgaggtcaggagtttgagaccagcctgaccaacatggagaaaccccatctctactaaaaatacaaaaaattagccaggcatgttggtgcatgcctgtaatcccagctactcaggagcctaaggcaggagaatcacttgaacctgggaggaggaggttgtggtgagccgagattgcaccattgcactccagccagggcaaaaaaagcgaaactccatctcaaaaaaataaaataaaataaaataaaataaaaaagaaacatagctttgcaactgaatggcatcccattcacttagcatcataatggaattctgttgaatagcttaaatttagggcaatcagagccaaagactcagttacggagtaactgtaggtcccgcttggcatgtgacagattagattccttggagaagttaaatccagaaatgagtcattttaataaagcaaaacacataatataaagggtatggataagaagctatgaaaatgcctaggatagacaaaaagaaagatatcctgggatagggaaagggacatttgaacatcaaattaagcaaagccatgaagtttggaatttttcttggcattttcttcccgtaccctgcaaatattaaatcaattgtcaatcaattgtcaattttacctttaaccatttctcttcttcatgtctttctccacacgatcactgatctagggtgagctcttactatctttacttataataggctagtttattcgctatttctatttccaggcatatcactctcaaaaccatcatccagattatttaaaaccttaaatctaatcacatctcccacttgcttgaaaccattcaaagtcttctagttgcctacaagataagatctaaacttatgtttctctgtggtctggcttctccttacctgtgccacctcctctcatgatgagccattctgtgatggtgcttcagcctgtaaaattgtttgtggtttcaaaaatattgcacttcatttcatgcctccataccttttcctcttcttgtaatgccttttcatattcatctccaacagggtaagttctgcacataattcagtgtcccttttccagtttgatgttgcagctcttccttcatctcaaatatccactggattaggtacatctgtgtgtacttcatcttatccatcctgttaaagaaaaaattatagaaggacaattgttaaagcatggtagggaaagttttatttaggaccatcatgataaatatatgggccactgcaatggaattgtttgcagtgtaggagagagaatgggctcaactctgtatatagcatgaacaagtgagaatttttaaccaaggaacagagtagaggtcagcagacagacaatgactaagaggtaacatcaggagtaatgggaattctggctaaactgacctaacagaattcttgctgaagacaaaccaatgtgatcaggtatcacctgggagttggtggagaatgaagaacttaatcaggtatcaagagtaatcagatatctaaagtggggcagttcttactaaactgacttagcacacttcttgctaaaaccagattttacaaggaagtgcacagatgagcctaggagaaggtagaggggtctgactaaagttttgatcaagtaaaaaagtctttatcaatcttggtatttcccgttaagcacaatgcttggaacataatagttgctcaacaaatgttggctgatctgattataagaataacatggatagatcatcctttgtaatctataagttttttaaaagtttatttttaattattatgaatacattccagttgtacatatttatggggtatatgtgatattttgatacaaacctgccatgtgtaatgatcaaatcagggtaattggggtatccatcacctcaagcatttatcattttttttgtgttaggaacattatacttctgctcttttagttattttgaaatatacaaataaattattgttaactgttattaccctgtaggtgttactgaacgctagatcttattccttctatctaactgtgttttcgtgccttttaacaatccccctttttatgttcccctcccccactacccatcccagtctctggtagccatcattctactctccatctccatgagttcaatattatttttagctcccacatattattgagagtatgcaatatttgtatttctgtgcctggcttacttcttaacataatgtgcttcattccattatttcttaacataatatgctttaattccatctacgttgttccaaatgacaggatttcagtttcttagtagctgaataatatttcattttgtatatgtactttattttctttatccattcatctactgatggattcttgggttgatttcatatcttgtctattgtaaatagtgctgtaataaacatgggagtgcagatatctctttgatatactgatttcctttcttttggatatatacccagaagtggcattactagatcatatggtagttctatttttagttttctgaggaatactccgtgctgttctctatagtggctgtactaatttattcccaccagcacactagagttcctctttttccgtatcctcatcagcattcattattgcctgtcttttggataaaagccattttaactggggtgagatgacgtcttatcgtagttttgatttgcatttctctgatgacaatctacaagttaatatgtctgaaaatctctcagtcatcctatcatgtttctactcttcaatgggaaaaattaatttatcaagccagattgtcatcttttcttaaaaaattacatgatatgaaattcacagctttcctattcaagtgagtttttcttatgtccagctagaatcccctttgggttaatataagtctttagtgtacgaatttgaatctttgcctgaggtgctacactgttggttctcttaaaaatttgtggcattatttaattcagtaaaatttgtgtggattgatttgtatcctttgaatagttagtattatataaatatctcagtctataagactcatccaaaactttggaattggaagtccaatctcctctccattagaagtcttgtcttggacatccagtctctatttaatccaatgatatgctccctgatttatctactcagactttttattgttagttaggtttattctttattttaaactgagatccgtcatcacaaaagccattcccatttacctgttgtcctttggctgtattgccctggttatatattactgggttttgctaaatgtttcctatcttttctttcaagttaaatctttatgtctctgttagattatcacatataaatgtgtaaaaacatagatattcctgcaaagcttacaaggaaacaataaaacagaaaagacttgatctaactcctccccacctcaatccagagctattactttcactcttttagttgtttcttctgattttacttccatatttccaaacaatgtggttatggtgctatttttattttgatgtctttacattcaatacatcaatgttgattttaggttttattttataaatatcctcaattttatcttccaattcttttgttgaataaatctttgctaataaatatgtatatacatatatttattatatatgtatatatatttacatataaataaatatatatacatattttaatatatatattttattttctaagggctttatgttgtattatttcttattttgatagcattcagattgcagtttttaaaagatacaaatcatttcttttatcatattaatgatgaggcttttaaaatcagttttctattctctgcattgtatctcttttttattccattttctttctttcttttctcctatgtaccttagtctcttgtttcatatttctattagagcctatcctacattgtctagttaatcttggctgtttgttgtcacttaataataaaactctaacaaaccattagaaactgtataattatagcaattttcaaaattattattagtgggtgaaattcactaaatctaaataggtggggatctacccattttattaagagaccaccctccaaaatgtcagatcttttctctcaagtcatttttttttagtaattcagtttctgaagtcttagttttctctctgtgcgttttctgcatttaggtggatagcatcttcataacagaggagaaaagggagtctgttaggcagattggtctcaggggtcagtatataaatttacacataatcctactatttttcttataacttcgcactgctgtcacagcctgagcctcttcaagtcagattccaatgctcttcttaaacagattctctgagtgtgtttgctgatttttgctgcagtggagagggtatttctcagttgatgtgatccttatataggcttttagtcactccatctgttttcagccccactgctggctctgccttcagaaatatgtgatgcctccaagttctctaactttatagggttctacagcaaaatatccttgtttactactggcttctttctctgtaaaaacttagctttccacttttttctgtcctactgtcaattaccacacatctatacacttttcatcttccaaatcttgttgacatttctcctctgctattgtcttttcatccagtctcttttgctactgcgaactatacagcctttatttttttcacaaccattttagtaggattttgaaagaaaatacagatagaaagcttgtgtttagtccaccatacttagtgagaagttgccataacatttttgaagattgaatgtacagtatggaatatgttcattatctcagtaccatgtttgggctcataaaaataaaaatagcagacatgagtgtggcctttattcatttgttcaacaggcttttactgcttgcctatcatgggaatggcaagaaacatcatttcagttaactgaaaggacaaatacaatattcttagtgatctccttccttcagttccccacaggaaatttgaggttgataaaacagcagcaaaagcatatttttagaagataaagagatggttcgtatgatgtacagaagtctacttgctactcaaagtgtgatcagtggtctagcagcatgcatccctgggagcttattggaagtacagattcttagtctcctctctgacctactggaacacaatctacgttttaatgaggtccccagggtagtcttaaaattggtccaagggaaaggattttattagaaaaaaagtgaaccttcttttatcccacctagggttaatgcataggaattttatctgtagtcaagatcataggcaccatgtgaagtgattttcttttctttctttttttttttttttgagacaatgtctcactgtgacccaggctgaagtgcagtggcacgatctcagctcactgcaacctctgcctcccaggttcaagtggttctcctgcctcagcctcgtgagtagctgggattacaggaatgcaccaccatgtccggctaatttttgtatttttagtagagataggatatcaccatgttggccaggctggtcttgaactcttgacctcaagtgatccacttgccttggactcccgaagttctgggattacaggcgtgagccactgtgcctggcatgaagtgattttcaaacatagttgatcataagaaccttgaaggggattatttgtttaaatgtagattcttctttcttttacattgtcgtaagtaatgtaatcaatgtggaatagggctgtaaacctattttaagggcttctgagatgctaatcagtcagatttgggaactatcagggaaaattttcaacccttttcatcatgatgtctcagggaccaaatatcttccatttgctacccaccacttcctgcaactcctaccagccatcactacagatgtatcatatcagatcctattttcttcatctttgccttctcctcaaatcatgtatagtcttgagactcatctgttcagttggcagagtgtcttccttctcccaagacaacatcctcgttttcatttttcccattcactctgtgccactgcttacctccatgcccaaatctccagctctctctttgctggcaggtgtcatgttctgacactgatttggggtcaagtctggggttctgaatcaggagcctgtgtttgatggggagtagatgccagaaggcattgacaagtggcaccatgcaggcgaataatgcaagaagagtcaccttgtgggaaaattgatgcctgataatctgtcccaccagggtgtcaagtccgagagtgagaatccatcaattaaactgtgggacggactttagagaggacagacttgagcacaggggtgtggagaattggttatggaagaaattcccaagcgaaatgaatatagttggaggaaatgtgaagagggtggggagtttcctgggcctctgctggaagagcagaatgtaagagttgagaatgttaaaccagcttgcataacgttttgctgaacagtttaattcagaagccaattgagatatctgttattcctgacaaactttaaaaggttctagaactggcaaaacaactaggtctgagcaaagtgaaaagacatagtgtgaccagctgggacaggaacgctgcaaacttgctaattagtctggaggaagccaattgcccacatttttatgtactgctaattactaaagtagcagcttgctataaagacaaaaataacagcatgatagtttcttgaatataggataaagtggcctttgggatgtaggctccatcaactttaaaaatattctgtagtttttaaacttaaagcatacagtgccgtaataaaaatacactttggaagtcagttattcacttttttccataggctgttagatgagaaattatagaatatatggtaccctgttgggaatttatactaaaggattttgttttaaagataccaactctccatttgaataccatttctcagctcattttaaacatttacccaattaaaaaagctaaataagtgattttaaaatgtgttttattttaaatacacagtgtttttttctgaaaatgctttctcaacccagttatatctgtgaaaagagaatgtcctttaggaatttaccaacttttcacgcagttgtagcattcattgtgggtgttcagtaaatatttgcagaaagaatgagtgaatgagcaaaggaataaatacacaaaaccttgtgtgcatgagaacgataggatttcacacttctaaggaacaactgagaacaactactccccttgtattcttttgaggatgaggaaatttaggcagaggacaagtaactcctctggggcctcacagctggttaggggcaaaactgggtctgggccccatttcttatgtctatcagcccagcagtcttttcattttaagcttatttgtattccctttaagagaataatgagttatttctgcagggctaattctgacctgaatcatattaaatcagcaaagcctggttttcttacactttcaaatgcagaatgacaaaagtaaagcatcttttaaaacaaaacaaagccaaagcaattggagtatttggttttattgaggagtgatgttttcaaaggcagagaagggagaaaaatggaaactctgtgccatggacttaacttgaaagctaaatgtcagacttgatgtaaaggaggaaaaccagccctgaggacctataactgcataaaagaaaaaaagcagatttctattgattgcagcaaatcaatagaagttcatgtatttgcggatttatttattgcttgcattggtcactgaaacctctaattagattcatagtgtacttagtgtattgtaattatatgtggcagagcacgtttgatgaaggtggatataagtagatgaatatttagacccagcaataccactaatgactcacatgccaggtaacatttctttacttgtaggacttattaagaagtggctgtgaattgtcttcttaattaaaggtttggttacatgaccaaagagttgttaataatggtgcagtcacttatcaaatgtgtgatcccacctaacttatttataattctgaacctagtgtttctcatatgtacagataggttcctaatgacacttaccacatggggttgttgtgaggattaaataagagcatgcaagtaaggttttacatagtgcattccacataaaaagcactcaataaatgttagctattattactgttttcagtcactccaggcgagctatattgtaaaaaaccatacttccattgcttcttcactagagcctagcaaatcattgttttctactggtctactatttgtggatatttctaccccaagatcctttcccaagaggacaatgcaatatagttgaaagattcttcttcacttggtgttcagaatatttcattcaaattcaacattcacaagtgcaatttgtactcgatattgtagactttccagaaaggtgaggttcattcattcaattgcttcttggctgagcaaatttatattctcttaaatcttgataagtcagttaatcttctctaaaattgaggaagttatactcattccactggggtgctatgaggatcggatgaaggtatatagcaaaagtgcttatttgtaaacatcatgttgttgaatgaatattggttattgatattttctgaaggtccccattccatgcctttttcagggccccgtgtaaagccatcccttctctgaagctttccctgacttctctaccttccatctagatgtcaactctcctccttttcactctcactccatttcagttgatcttccttggaattcaaaatacatactgccttgtagagcagtgatttgtatttatttcattccttcttctacactttcagaaggaagtgtctacatctcattgacctcattgtcccacacagtgcataacacagtatcttgcctgtaataatgctcaacaaatatttgattaatgaatagacaggcttttatgaatccatgtgtaatgttaagttctatgaattatgtagaaatagtaaaagcaaataaagactcaattacaattttaactcttcaacaagatgatcaaatccttgaggattagaaattaattaaaaatgaactcatcctttattcattcatcccattatttaataaataaacataaatcgagcaccttccaggtgccagatactatgttggattcgaggaatttaatgcaattaaaataaatagtttcatcccatagaggttgcagtttgtaagtaataagaaataaggaaataattccaaacttgcttttgcaggatgaatatttagaactttctttattaaaagaggtcagtaaaacattcttaactgctttttctatccattattaattccaataatttggtcactgttcattagtgagattaaatttggctactgagagtaggtcatgcaaatcatctttctggttaaaaaaaggcctgtagctactgggtgaaatttgctttgaattatttttcataatcacaagtaattgggcatgtcgtactcagttataaataaatatacaaaagtacactgatctactttccttaataatgagtttgaaaaccatcgctatgttacttaaacttacttttcttcactatttaaaaagtccagagggcacaagtaaccttcagagaatctttccacattacaaggcaaaattatttaataaaatttctgaacatacattttaattgaaaagtcataagcaattctacactgatggggaaccagccaatgtgatgcaaaatgaatttctcagtaactgttttgtgtgtaggtaattttaagtgaaagaaattttttttctattgtacaaaccaagactaatttattcattgttgttccaaagcagcagaagccaccagaatgtcacattttatttttaattcacaaaattaaatatacttatggtgtacaatattgagttttgaaatatgtatacactagaatagtggactcaagctaacatatgtattacctcaaatactgatttttttgttgtgagaacaattaaactctctctttgcaattttcaagtataaaatacattgttattaactgtagtcattatattgtacaatggatttcttgaacttattgttccatctaactggaattttgtaccctttggtcaaacatctctctaatcccacccgcctacaccacctcagcacctggtaaccaccattctactctctcctgctatgagtttgttttttttttagatttcatatataagcgaggtcgtgcagtatttgtcttcctgagcatggcttattttacttaacataatatcctcaagatttgtccatgttgttacaaattaggagatttttatctttttaaaggctcaataatattggttgtgtacatataccatgttttctttttccatttccatttatgtgtcgatgaacacttaggttgattccgtatgtttagccaaggtgaataatgctgcagtgaatgttggactgcagatatctctttgtcattctgaattcttttcctttggatatataccctgtatcaggatcactggatcgtatggtaattctattttaattttttgaggaacttccatactatttttcataatggctacatgatatatccccaacagcagtataccagggttcccttttctctacatccttgctaatacttatcttttatctttatgataacaactaatctatagtaatagctaatctatagctaggtataaggtgatatttcgttgtggttttaatttgcatttccctgataattagtgatgttgaacattttttaatgtacttgttagccgtctgtatgtctccctgtaggaaatgtctatttagatcctttgcttattttttaattgggttatttgtttacttgctatgaagttgtttgaattctttatatattttagatattaaccccttatcatagaatgacgcattttaagacaaggaatgaatcttgtgaaagcttaattccctgtcctaattcctcaccctttacacctccttgcactagacacactcatttacaaactctatacttctactgtattcctatgactggagggtgtttatgagaaaagcaggtgagccttagagtaccagtatatcaatttttttccacagtaggttaagggattcatggagggaccccccctgccccccaaattgatttgccttttgcattagtcaaggttctggcaggaaaactggtgacactctcaaatgggggtaataatataagaattgggccgggcgcggtggctcacgcctgtaatcccagcactttgggaggccgaggcgggcggatcacgaggtcaggagatcgagaccatcccggctaaaacggtgaaaccccgtctctactaaaaatacaaaaaaattagccgggcgtagtggcgggcgcctgtagtcccagctacttgggaggctgaggcaggagaatggcatgaacccgggaggcggagcttgcagtgagccgagatcccgccactgcactccagcctgggcgacagagcgagactccgtctcaaaaaaaaaaaaaaaaaaaaaaaagaattgacccatttacaatagtataggcagggtaagtctgttgtcagggaagccaataaaggatggagaagcacctttttacccattacctctcttaggcttgaagggggaaagggagtgaatatttattggaacaaagagccagagatgtggctgtaactgggagagggcctcccaataggatctgaaaagttcagtagtgaaatgcaagcactgcaacccgaggcctggcagggaggagaccaaagaaactgatatcccaatctcacttttcccactccctggctttctgccaatgactcccatttgatgcagtccagaaagatgggcttcctagagagcagagtagggtggaaaatggattcagagggccatgaagagtatcagagtatcaagaatacctgttacattataaggaatatatatgtatatatgtatttattcatatggtacatgtgcttacaagcaggaagctattgtgtatatataagtgttatgtatttacgcatatggtacatgtgcctacaagcagaaagctattaatcctttcaagaacctttacaggcattattcatttaatattgataaaaccatttcaaatgagctgataatggtttggctgtgtccccacccaaatcacatcttgaattatagttcccataatccccatgtatcatgggagggacccagtgagaagtaattaaatcacgggggcaattacccttatgctgttctcatgatagtgagtgagttctcacaagatttgatggtttcataaggggattttcccccttttgcttggcatttctccttcctgctgtcatgtgaagaaggatgtgtttgcttccccttccaccatgattgtaagtttcctgaggcctccccagtcatgtgaaactgtaagtcagttaaacctcttgctttataaattacccagtcctgggtatttcttcatgtcaggctgagaatggactaatacagtaaattggcaccaggtagtgggatactgctgtaaagatgcctgaaaatgtagaagcacctttggaactgggtaacatacagaggatggaacagtttggagggctcagaagaagagaggaagatggggaaagtttggaacttcctggatacttgttgaatggctttgaccaaaatgctgatactgacatggacaatgaagtccaaactgaggtggtctcagatggagatgaggaacttgttgggaactggagtaaaggtgactcttgctatgctctaaaaaagagactggtggcattttgcccctgctctagagatctgtggaactttgaacttgagagagatgatttagggtatctagtagaagaaatttctaagcagcaaagtgttcaagacgtgacttgggtgctgtaaaaagcattcaattttatatattcacaaagatagaatttggaattggaaattgtttaaatgagaagcagagcataaaagtttggaaaatttgtagcttgctgatgtgccagaaaagaaaaacccattttctgaagagaaattcaagccagctgcagaaatttgcataagtaatgaaccaaatgttaatcaccatgataatggggaaaatgtctccagggcatgtcagagaccacaacagtccctcccatcacaaacctggaggcctaggagggaaaaatggtttcctgggccaggtccagggctcccctgctgtgtgcaacttgagtcccagctgctccagccatggctaaaatgtgccaaggtacagctcaggatattgtttcaaaaggtgtaagcccccattcttggcagcttccacatagtgttgggcctgtgattgtatagaagacaagaattgagtttggtgaacttctgcctagatttcagaggatgtatggaaacacctggatgtccaggcagaagtctgctgcaggggcagagccctcatggagaagctctactagggcagtgcagaagggaaatgtggggttggagcccccacacggagtccctactggggtactgactagtagaactgtgagaagagggccactgtcctccagaacccagaatggtagatccactgacagcttgcattatgtggctggaaaagctgcagacactcaacagcagccatgaaagcagccaggaggggcactgtaccctacaaagccacaggggcagtgctgtccaagccatgggagcccacctcttgcatcagcatgccctggatgtgagacatgtagtctaaggagatagttttggaactttaaggtttaatgactgccctattggattacttgcatgaggcctgtagcctctttgttttggccaatttctcccatttggaatgggtatatttacccaatgcctatacccccattttatctaggaagtaactaacttcttttattttacagtctcataggtggaaaggacttgccttgtctcggatgagactttggacttggacttttgagttaatgctggaataagttaagaatttgggggactgttgaaagggcgtgatcatgttttgaattgtgagggcatgagatttgtgaggggccaggggcagaataatatggtttggctatgtttgcacctaaatctcatcttgaattttagttcccataatccccatgtgttatgggagggacccagtgggaggtacttgaatcatgggagtggttaccctcatgctgttctcatgatagtgagtgagttctcacaagagctgatgattttataaggaggttttcccccttttgctcagcacttctccctggtgccaccatgtgaagaaggacatgtttgcttccccttctgccatgattgtaagtttcctgaggcctttccagccctggtgaactggagtccatgaaagatctttcctttataaattacccagtctcaggtatttcttcatagcagtgtgagaataaactaatatataagccttattattctcatgtgatataacaaaatatattaatgtagatgtgtttacagacatcttctttattccagctcaacagcccaaattcttttcaccttctgtaaagaagagtgactggaagagagactaagttaattgagataattaataagtgagtgagagaataaatgaattatagaggaggaaccaaaagcacagagctggaagtggaacaggaggttctcagcaattttaaaagtgaaggcaccgtagcagtggaagtatataaagggagtaaagtcaggctgggaaaacagaaggcaaaaatagtgttcatctagactgtgtgtcagattacttctaatatccttcaaggtacttgagtgaggaataatttcctcttatgtttctattggtattgggttgtccttttggatgaggctcagctcagagactgaaccatgtgatgtctgtgtattttagggttgcactcactttgcattaattttaactgagagttaaaggggttaagtgccttgcctaagatcacatactcagaaaatgcagagagcttactccagcccaggtttgttcatttcagatacattagtctcaattcagctttggttgaagtcacctgtgatgaatttgttgcatgatatagttttctgggggaaagatttcttttaatacatggtaagtatatagtaccccttttatagttggatagattagttctttaaatttcttttgtaaagaggatagattagtaatggtcaagtgtcattgagtgattcagacgaatagttccatgattaaatcttgtttcctttactttttgtataatgctaatgtatcccttaaaataaaaactccatttagttttcttcagttcatttaatcatggcattgttactgtaagaaagttcttctcctaatggtttctaattgctcttaaaatcttgtttgaatcccagaacaaatctctgtgttatatgtcaccagtgacccacccttactttctctcatttactgcctttcataagcagaaagcatttattttttgggtatttttgcttattttttaaaaataaataacattgatttttaatcctgggatatggaagatagtttaaagaaaacagcagtgtcggtggatagcaattaccaccaacaaaatatcttctgggtatttgatctatgaactttgtttgcactcctgcccacatcagtttttgtaacccttccaacttcctcctaagggcaaactcactgacatttccacaactgttcacctttctgatcctgataggattactatatattttgtttaggtttctagatatgataagactatctacctatccaacttggatctgtggcactttattttcctattaattttaaattcaggatttaaaaaagatacttacatagtgataaaatgagttgactcacaccctgcattattctaaaccaaaattaagttatattaatacattctctttaatcaagggtaaattcacatgccccattgtggttagtgaagtggtgaagggaaagttgaagccaaacagcctatgtcttaattctaactcagccactaactagctgtgcaatcttggacaaggccctgaaactctctgggtctcagttttctcatttctactaaaaggacaataatagtacctattacctagagttaggaagatgaagttaacaaagtgatagtgtattaaagcgtacctgacacataggaaacattcagtatatattgtctgctattattaaagctcctacacttattaggtaggtgaacttaatcagattatttgactttaataaacagcaatgatcatatttataaagtagggattgtaaaatataatgcagtgagtttacaagtgtcataatgtgaaatatataaatataaattacatatataaaatatataaatataaattacatatgtaaaatatataaatatacattatataaattatgtatgtaaaatatataaatataaattacatatgtaaaaagtacatagccatgttttgactcataaagagcattcattaaatgtggttacaatttttagaagacattatcagtaatattatcagtaatagaataagacctacaaaaaagggtaggggagagagtttcatgttgtataaggggagtgttgatttaaaagccttagattaaaatctgcaaatgaaactaaattaaaggtgttttgaagtgattttaaccgccaaacaaattgcatttaatacataataattactttattctcccattaaaataattatttttaagtgaataacagcttctttgaccaccctacctgtagttgcagtaacagtctaccagttgtctttccaaatttgtatgatgtcatcagcagcttaatagagcattagatgagaatgtctgagcattactatgctgactttgtaaaattgtaatccaaaagcaaagaatcttgacagcttagacagttggtttgatcttattattaatgaacagaagatatatcttaggctattttaaaagtgaatttataataagatttctacttcctatgttagctagagtaaacactagctaataaaccaccctcctaaacctcagcaaactagcccaagaaaagagtttaattttggtattagtattgctcactcacataaagcccaagcaattaggagcagaggaagggatgtgagggtttgctctatagagtcatagaggatccaaggtgacagagcctctgtcatcttccacacaggccttccaagatggttctagccaaatccagctagccaacatctctggaaatgacaagcatcacttttggtcatatttcattggtcagaagttagtcagagggtacctagttgcaagggaagctgggaaatgtagtctggctggcattgctttgttgcactaactcagtcctgtggaaaaggagcacaaatatttggtggacagtaaatgatctgtgtcatatccttattactcagatccatagtaataatgtctgtttttatctccttttctaattcctagtaaagaagcaatcaaataaaaagaaataaaaacactgaacagtatgtgttcatttgtctcatccattattgtatatagtgcctgatacagagttcagtatatattcagtatatatagtacctgatacagagttcatgatattcaataaatatcatgagtgatcaaacacatattctctgccttcttctcttcctcccttccttttttctctttttcttgcttcttttatatctctttctttttttctgatcccaaacactttagagtctttaatttgagctagattctatgataagtgattgaagaatcaaagacatatttaaccttggggaaagtcataatgggaataaaggaaaaaacattaatataaagtattagtaaacatttctaaattactgatttcattaaaatatttaacagtcttatgaaagactaaagaatcattttgagttcatctactaggcatggacaagccacttcaggaagtttaatatccttctttgtgcctttgggtttaatctgtgctagtgataccccagccttgacagaattgctgccccaatggcccaggctgtgggattctgcacaggaaagaccacttcatggtgaaaattctctaaagttttgctgtgaatcataccataacctaagatctgtgttatggtaaactggatactgtagtggtggaggatgtctaacttcgttttgtgtttcacagagtttcaagagttttcctgtaagcctctttagtctttgtatatttaatgtgctccaatcctacttacatctcaactgtgttctttctgatggcgatggtgatgatagtgccaatcatttatttagcactaacaactgtgtgctcgacactgtaccaatattattagaactattatttcttttactcatcacatcagccctattagatatttagagatttggaaaattatgttcagatagatttggtaacttgtctaaggtcagacatgttaggaaaaggcagagctagaattcaaatacagttttgactgagctcaaagcttgtgtaatcaccacttaggctgatgatttgtttaggctattgagagagaaagattattttatctttctttttttttctggaaagagggatgtatacagatcttttagtagtaaaattttgccactacattcagtgacaaaaacaggagttacttttgcaccaacctgataactcttcaaaatgtttggtgaggctggactcaaacataagtgcatggatgcctgatttttttcccccagtattcaagaacctcagggttttcctgaatgtgctatagacattccagggacctcctaagttttgaacattgcattattatgaagattaggtccataagttttatcagattttctaaaatacgagtaaacattttttaaacccaaggtttgctgccaacttctctcctctacagatcctggaaagaagaaagaaatggcttctaacaaaaagaaggggaggatttccagctcatttctaattcaggctcattggagaaggaagtggcatgggtgacgataagcagcagtttttatgtctgaaggaaactgaaaacagcatctcactggggtggccaggagctcttctgctgaagtctctgtgtatccagaatgcctgggattggattcttgtcctgttgcctctgacttcctagaagtggcctctgggccgtctttatttattaaatcatctgggtatgatctggctctgatattttggcattcgggagtggcagaccaagctcaaattgcaatagtcctttaaaaagatgtttctaaaagccagatatgcactgacatttcagaaagaacatttgtgcctaatttccagctgccaagttatagttcatcattcagcttcatattggaggccttcaggctttgatttatttaggaaacattggtgaacaatgggatcatgatctgcaacatgacagatgtaggaagtccatgtcccctaaaggaggttttctggagactcctaacaattaagagaatctgttctgtttctaagttgacagcaaattattgaattctgagtatccagaatgagtttggggagtaagagttgtgaagggcagacattaactgcttatttaagacataatacctgtcctttggaaacttatggtttgttagggggtagtgtcctagaaacaatgtaagacaatttgttaccaaatgataaatagaactttaaaacaaaaattttcctactgtcagggaaactaagttttccttttctttgaaggcatggagaagtgccgagcagtgtgttacttttcctctattccctggttcgttcctcacccacgtcagtttttcttcatatttgtctttattggaacccacaaagtttattcaaagttattatcagtttcttcccttttgtgaagaaaattcaatttttatgaattagatttttaagatggcttgtaatgtacccatacagccaggtataagaaattacctggtagcttcactgatgcagatgacagatacctgtggggacttacagtctagttgggagagtaatcacacacatacacacacacacacacacacacaccccagatttggcatgagaagaacaacgctgaagtcgatatctgcctattttgtttataatggtgtgaccttgggcaagtcacttaatttttcaatgtattttctcatctataagatgggagatatcttatatcctaaggctattgattatgtcagatggaatctcatctgagaaaataccttagaaattgtacagtatgataaaaatattgacttttattttctaaatcatacatagcaagatgcaggactagtttaattgttgtcacttttagaatccgattttcacatcatcattccatttcttatgatatttaacatgacaagcaaaagaccttgttcaaaggggaagaacaaataagattaattctctgtaaatcctttaaaattttattatccatctcttcactggggaaatgtctagatacattttcctaagtggttccatctttctgtaaatggctattgacctgctgagtgcagttttgctttcagagaagcattgcacttggtgtgtgatttgagtttgggatcatgaccttatttcctttgcacttgattgctttacttcaccaactgcatccctgattttgatattatctgtggctagctcctttcatgattttgggaatggctacctctcagttttctgaatattttttagtacttgctgttacaatgtagacattgcaataatgttctaaaattatatgtacatttacttactcaacacaaatttaaagagtacctgataagagctggtactctgagtactgagcactgagtacctggtagaatcattaatacagaagacaaagctctggcctcaaggattctgcagtacagcagcagggaggtaaaacacacataccacatttgtttactgcaagtgtgggaggtagataggtgtcccctaaaaacatgtgttcccagaacctgtgacgtgaccttacttggaaaaagggtctttgcagatgtttaagttaataatcttgtgatgagatcatcctggattgtacaggtgggccctaaatccagtgaaaactatctttgtaagagacagatgaggagaagacgtagagacttgtgaaacagaaggccatgtgaagacagaggcagagattggagggatataaccagaaagaatgcccataggcagcagaaattggaagaggtaagaattggattgttgcctaaagccttcagaaggagtgtgaccctgtcagcatttggatctccgactctggcctttaaaactgagagagaaaaaaatttctgttgttttaagccagtgagtttgtggtaattttttaatggcagccatgagaaacgaatacaacaaggaacaggataatctacaaaatacatgaattatacaagagcatcagaagtttgtggaaatttagtataaaaaacacctcttattgaaagtgtgattgttactatacagtcagtccagaagcactgaattatgaaaatatcattgcctggtatgtgtcagttatgtttataataatataaataatctaagcacacattgtgtcctgtaattttaattttactctaacatcccatgcaaaggtttaactgtaggtggccatttcatgaaacaaatgccaatttctcatggaccaatgttctcccagcagaggaaatatatcttcctgcccacactgggctacaacatcactaaaattacaagcagaaaggaggtctgcatttctatagcctcttcttttcttatctagtagtaaatggttataaacttgacattttccagttacaaacataagtaataatattgtaataacaaaagggaaggtccaatcctatagatcccactgatggtgatagagtaaatcaaggaatttggaagaagtggtatctagtttcacaagttgaaaaaccagaattatcttcaggcattcataatttcagtgtcatgggttaaggtgtttgggggcaaaatgagtttctggctgtgggatggatttgagtggtgttagcaatcattcaataacagaagccactgaagcagccttcgtctccctaatcaaaatgctgccatcataccattttgctcccaaaatatgctaaaagtaaggcaccaacggtaataagtagtataggtaatttttaagtaccataaaagtttacaatattaacagttacatttgttaattttgtctggcttagttggtggtgacttcagatggtaactgggtggaataagacttctaagcccacataagacaggatggtgtgatctttctgggagggtgccacgtctgtccaatattgatacaatagtgcaccagtggcagcttcttggttgggccaagtaagccttctcaatgtatttactccttcagtatttataacaatcaggaagctgtaattattgtccatattttactaatgaagtaactaaaacttagagaagataagcaatttgtctgaggtcatgctctagtagtgagcagagccagaatctgaactctggcatgatgactatagcgtctgtgtttttatgcattactgataggtatgggtggtatactggagacttagtgagtatttaggtgtgagtaacgtctacagtgacgtcagggagctcactgtacatccatgacatgagaaataaaattcccacgcttccctgtcttgaagctgaggcaatatattacatgggttaactgacaattcagacagagtgagagattcattatattcaccacaaatgaacacagatggacactcttcaaataaagcttcctattgaattttaatagtgctcttctgcagaacacatttgaaaaatggatcatagcatattcatattttcctttagcttgccaaatgtgagatgattaagaaacctgcttaaactttaaatattcttaccatacacatgcatttttcaaatgtatgcgtctgcaataaatatttgttaaatgaatatgaatgtatatacacaaacatacatgaagcaataggcgcacacacatttaatttgataaatatttgttgagtatctactgaatataaacttgggctgaagagttatggaaatacaaagacagaattcttttctgttcccaagaagctttataaggggaagtgagacatgctcagtcttgttctggtggcagctctcaaagtgtggtctctggctcggcagtgttggcatcacttggggacttgttagaaatggaaatgcttgtgccccaccatacacctgctaaatgagaaactgtggctgggggtctagcaatttatggttgtaaaagtcctccagggaactctgatgcacgttaaaatttcagaaccactgggcacaggaacgctttaatgtgctaaaggatgctaaatattactttcacgtggagacatctgagaaggcttgaagaaagagattgtatttgagcagagtcttggagaacaggtagattttggctgatagaaacagagaagggaaataaagtcaaagagaagagaggaagtcaacttagctcgtttgagttggcagataggctgcccatggatgaaaacccagattaaaatcaggcagtggaaatccctgagcaacacgcttgtgagtttagacattgttctgaaagacattggcagtcattgaaggtttctgagtggggaagaagtgtgatcaaaactaccttccttttttttttttcttacccagtgaatgtaattcagcacttgtactgagttcatattaacagaacttgatggttgtaaatcagtcttttcttcctcattaaaatcacttcaccattaagaattatctataggttatggctggaatcatgttatctctgctctttcttgactattctgacacagcaggcaacttaatttcaacaactcggtaatgcccccatcttctgtgtgtgtgtgtgtgtgtgtgtgtgtgtgtgtgtgtggtgtttgctaagaaggagtcacacggctgcttttgaattcagctgggctttaggaagctgcataaaaacaaagaaaaaatgttgctgcttgctagtgcattctttgttatgtagcaatcagaaggatgactgtgctctgaagtggtgcaggtggcctcttctgatactaattccagcgtctcaactagttcagcatcaaaagggagttctctggaagggaaataattctgtccctacccctgattgctcctatttgcccagcattgtgggcacctgcttggccacccaccttccttttctttgccatccacttgcgtcatctttctcttcccctgggtcagcctgtatatttcaatctatccacaccctgcgcaagctcattcattcatgggctttctctctgcaattttcattgtgcctccctttgttggcataattgattccctgctttgcaagagcaggtggatgagttggtttattcctttaaaaaattcctcctcttttctctttcattgctctgatctttagtcaatctttggttcagccagcttgttctccttctattgactaatctctctctgtatctttcataatggtggtgggagagtccatgccgaatctcctgttggttgaagaaggtgaaagtcaattggtaaagtcactgtgatttataatgttcaaactggggagggattgagtcgtgaagaccagaagtactgataatcatttagcttatttgctggaaggctccactagaccctaatgaaacaatctcatttatcttccccacatcctaatggaattgcagaattaatagtaaaaccattaagccttcttgagcatgtctcatctaacactccaggatctttgttacacatttttatttttctcaattttggattttttgagggtgcgaatttacttagctgagaaatttagaagtcctttattcagtctagtataaagtgtccagataaaaacataccttagagatattgtgggtgcagttccagaccaccacaataaagcagataccacaataaagcaagcatataaattgtttggtttcccagtgcatataaaagttatttttactctatagtctattaagtatgcaatagaatgatgtctaaaataaaatgtacataccctaattataagtattgtgttgctaaaaattgctgatgataatctgagcatacagtgggtcataatcttcttacttgtgaagggtcttgccttgatattgacggctgctcactgatcagggtagtggttgctgaaggaggttagggtggctgtagcaatttcctaaaataagacaacaatgaagtttgctttatcaattaactcttgcttttatgaaagatatctttgtagcatacgatgctgtttgatagcattttacccacagtagaacttctttcaaaattagaatgaattcactcaaaacttgcaggtgctttatcaactgaatttatggaatattctaaatcctttgtagtcatttcaacaatgttcacagcatctttaccaggagaaaattccattttaagaaactactttctttgctcatctatagaagcaactcttaaaatccattccagttttatcatgagatggcagcaattcagtcacagcttcagtttctacctctagttctagttctcttgctacttccaccacatctgcatctactttctccactgatgttttgaacccttcagccatccatgaagattggaatcttttccaaactcctgttaatgttgatatttcaaacttctcccatgaatcacgaatgttctttatggcatttacaatgttaaatcattttcaaaaaattttccatttgctttatccatatctatcagaggaatcaccatgtcagttctagccttacaaagtgtattttttaaataataagacttgaaagttgaaattattccttgattcatgggctagagaatggatgttacgttagcagacatgaaagccacattaatcttcttgtactcccatcaaagttctggagtgactaggtgcattgtcaatgaatagtaacattttgaaaaaaaaaaaaatcttttttttttccttagcagtagttctcaatagtaggcttaaagtattcagtaaaccattttgtaaatagatgtactgtcatccaggctttgttgttccatttacagagcacaggcagagtagattttgctaaattctggggccctaggattttttgaatggtatataagcattggcttcaacttaaagtcaccagctgccttagcccccaacaatatagtcagcccgccctttgaagtcaggtattgatgtctcctctgtagctataaaggtcctaggtggcatctttttcctatataaagctgtttcatctacagtaaaaatctcttgcttggtgtagtcaccttcatcaattatcttagctggatgtaacggataacttgctgcagcgtctacataagcacttgccgctttaccttgtgcttttatgttatagagatgatttctctccttaaacctcatgaaccaatatcttctagctttaaacttttttctgcatcttcctcacctctcttagccttcatagaattggaaatagtttgggccttgctctgggttaggctttggcttaagggaatgttgtggctggtttgatcttcaatccagaccactacaactttctccatataagcaataagcttgtttaactttcttatcatctgtgtgttcactggagtagcacttttaatttccttcaagaacttttcctttgcattcacaactaggttaactgtttggcacaagaagcctagatctcagcctatctcagttttcaacatgcctcactgagcttaatcatttctagcttttgatttgaagttagagatatgagactcttcctttcatttgaatacttaggcctttgtgggagtattaattggcctaatttctatattattgtgtctcagggaatagggaggcccaaggagaggaagaaaaatgtgagaatggccagtaagttgagcggtcagaagacacacaacatttattaagttggccatcttatatggacatgatttgtgttgccttcaaagaattacaataatgacatcaaagatcactcatcaaagatcaccatctcagatataataataatgaaaaagttttacgtgttgagagaattaccaaaatgtgatgtagtgacatgaatcaggcacatgcagttagaaaaatggtgtggattgacttgctcaaccaacggttgccccaaaccatcaatttgtttttaaaaatgcaattgttgtaaaatgcaaaaaagtgaagcacaaaaaaactaggtatgcttgtgataggtttctctcctattctttgaagaggcttttaaatagagttgattgcatggcattgcctagtaaaatcattttaaactaatatgaaattatataagctctgaacagggcatttgatgtccactagggaaagtaaaacatattttttatttcagcataagaagcttatctcttccatcttgtaaaataatataataataatagaattagttaaacatggtgattactattacgtattttatgattccaataattcaagcacagacactatcttgaatgcgtcctagtatattcagctccacaatgatgcctagggtttcatgttgaaggctgtgaagttaacaaaggaaaatggagatctgattactagcttccagagattggttgagaattgagggagaagagagatcaacattatatatttcacatggcagagggtaataggagcttttatagagaggcaaaatgcattggtagaaagagaagagagagcctaattccacttgctaaaaatctatggaagccacctaaaggaagaatgaaaaattgaatgtttatcaataagttggaaagaggagaggaacattatgggcagagcaaacagcatagaaatagaataatacatggagtatttgttagcattcagagggaatggagatgacgggaaatggtagaacatagttagaaaagtaaattgggcagaattggtgacaggggattcaatttggtaagcagtgggtaaccattcatggctttgagcagagtttggcaaactatgatttgtggaccaaatccatcccattgtctgatcttgtaaagaaagttttatttaaatacagtcatactcattcacttatgtattgtctgtggctgctttcatgctacaatggcagcattgaatagtggtgacagagactgcctacaagctgaaaatatttgatatatgactttttacagaaattttaccgatgtcaggattcactttaataaagtgtttcataaagtgtttgtttgtgccgtgatgggccatccaagattgtaatgggcgatcattggaaacaaagatgcttatagagcagcatcttgcatgtcacaaatatttgaatgaatgaaaaaatgcatatttctgttaagacatcacagtaacagtaggagatattgctttttttttctttctttttttttgacaagaccaatgtgaaaataatcagagagtggttctctggaccacatcctgttcttcaggggagagacattgaaaaacatcaggaaaagcttatccctagaattgattcagaggacaaagctacagttatgagaaaggccactttggagaaatgttggataagatgtccagtgaggcacagaatggggtgacactgggagtgacaggatcttgatggactctggccatggcacttctcaaacgtttttggcagtcctatttctattttcacagactcctccacctccactctgtcctggccagcacccagttctcaagcattacacatttatcccaagtaatgcgtagggagcttcctttcttgcacctataaattattcactagtttcagattggggtgaaaagaggaaaacataattaatccagaattatttcacatgtataaattccttgcttggttttgtttcatcatcagggcttccttggccttccatggatggcatataccttattaatttatgcttagcaatcttttgaaaataatttttacatgggtaactcactgaaacatcatggcatttatctcacatcatgtagttttgtcagttttgatgttagagaacgtattctgccttacttttatgtagcaatgtgaccaggaaatctcatgtaaaatctatgcctccctaatatgcaaaaatactgaaaatgagcacctcttctcccttccttcttttttaataaatctagtaataatagctggaataatcacaggatttctaaatggagtcagcatggcaaaggaaaatgttggtgatatatttattaagtccatagaagttaaacttccggagagctcccaagctaattggtaccccttgttcaggactggggactattaactgagagaattcattgggtgttttaatatctagccttttaaaatctattttaaacaaggactttgaaggatgactgaaatgtggttaaatttccacagagaacttacaactccagcaatgggaactccccaggtacagtgatgatacgaattgtgttggatttcttgaatttcatcttcaaagcacaagaatgagaaaagaaaggagacaggaaccatttacattaagcagagatgcataagtttcttaagtggtgctttccagagcacagctgggtttcgtgtgtgtgtgtgtgtgtgtgtgtgtgtgtgtgtgtgtgtgtgtgtgtctgatatatcaagctgtcggttatattccatagattcatagtattttcctcctctctatattccatctctactttttgtttataacaagttatttactttgcccatctatcttttaagcaaattatcttgattggaaataactggaatgcttgataattatataagaaacttaaatacttggcctattcatttatcctagagttttagggaacatcttggtctagcataggcattctcaaccatcatattgaaaaaaattgtggagcattatagcacaaatgattttacaaaataaaatgattgttaaaaattagaataggttcatagtagcctcacgctctgggttccatcatgcttcttgggagagagagaaagagcagactggctggtcagaaccctggctttgactgaagaacacattctgcctgtaagcataatttctcagctctgagccagagaaaagcagtgggactcttttctctaggaaatacagtctgcatagatagaatgaagcagaattggagacacataggaaaacaattatccctttgtattagtttatctaatcctctgctttgggaaaacaggaagagagaaaaagaagagggaggagagggagggagctaaaaacaaaggaaaacacttcacaagggtttgccctcccccaaaaattcaagacatgaaatagaatctatcacatatgattgggagccttgtgttctggttttctccaatcctaagcccaagaatttgttcctcctgatgctgtagatagtttcacctgagaagattttactcacctctgcgtcccattatgagatgggaaacctggcttctgccacgtgggcacagagtagatacccactagattttgttgttttgtgtgtatggttgccagggatgatcagtgccccaatattcttgccccatcaatattcttcttagtgagatttgcaaccttttaagcattgggaacttaagggttattatgaatacctgtcattttaagctaatatacattctttacagaataaatgcaaaatgttcacattcatgagaaaaaggaagaaacttttagctgacacataccattttgcatgttatataaatgtattctgctcagtacaaacatttttgtgaacttaaaaaaaatctcttaaatgtttctataaaagtactacttcttgaagtttatatttgaatgaaaatacctcaaattcttttctaccctgacttagaactatataactttaactctctttttcatttttaaagatgtgatattcctctgatgagataacgtggagctttcctctaaaattttcttgtgttcagaccttttttttctcttccttctggtcttcaaaaagctataggaatctgacctaggaacactgtttcctcaataattggcattttctattttcactttggttttccccaacttaattgatgagatatataatctttctccatccaaagaaactacaatgactgacactaacatttttgaacccatctatgcccatttccatttttagttctacaaatgttctgacaccattttttaaaaaatcacaacaccccaaacagtgggttctatttttttttctattgttatagatgagtaaactgacacctaaagagggcccttagcttgtggctggcatctcaggaccaaaatgcctgcgtttgaagcccctgggaatttggcctttggagcctttagcagcttctaagcctagtgagtttgtggcttcaggtcctgtttaggtcctgtttctcatttgtggagaggttggtcttgttttgaaggcagcaacctccttcattttttttcttttttttttttcactatctatcattactacgtttggtgccaagttggggcctcaaattttgaacttaaaacatgacatgcctggaaatccttttctctctcttcttctgaagggtgtccataaagtctgggatgcagacaaatatatgtaatgtcattaaaatttttacaaatctgtaaaaaataaaatagtattatcaatgttttcataccttacagatgcccttcactttaaataaagatttcctgagaactaaaaataaaaataccatgtcctcaagtttggattagtccagggagtagggagaagggctgagaaagagaagggtaaaattatctattcttgacatcactgtaataaattgattgaactgtactgcatattgaatgcttgctcttactagggtctcttcataaatcatctcattattcctcaaaataagtcagcctgctaggtttgatgagcccatttgacagatacacaagtccaaggacatcaaatgactcgcccaacatcactagggcatgtgggctgaatgaggatgttcagtctggtcacatcaaaagccctagctcttttccctataagctagaaataatattccatcccttttctcacctacctcccagcaaaaacaaatgacataaaaatatttttttctatctgcttctgctcatgatacctttaaaatgccttattcatcaattcattccccatctcaggctcaggtaacccttgatgggggatttgtatctaattttctctgtatttcttgaaccatttttttttccatgtgtccatctctatggatccaacctcatgatttcctggaccatttaaattgtcttttattctttcttttttctctatcacatatcttggctctaactcacctgctttccctttgtatttctcttttaatattttacatgtatgtattaccccaactagacagtgttttcaagggagaacttaggaatttttcatttctttccaccatgacatcagacatctttctgatgtcatagcttatgaaataaaagtctataagtatgtgacctgggtaaaacataatcattttgagacttaatgatatgatctctatcaaagttattgtcaactgcagttcattctgctgttatttttatatttgatgataattcagaatttcatgtccccttctataatacctcacatgccaaacaaattaattgtgttaatgacaggtaaggaagctcctggtcactttccttccttgcttcagacccagcttcaaggtgggccagatggggcacaggctgcctcctctgtctgggttcgagttacttgtaaccatgtctgactgtcctggggtgcctcttagctccagttaatttctgaatcctcagcaagttttaaaagtctgagcaagaatttcctttcttactctgttgcttcatctttttcctttcttctctcaaatattcaggatggaggagaaacggcaggctgagccagcaatccatcttacttgaaacctatttgaaggttgtcgggtatgcaagggggctggaaatagggactgagagtttgattccagcatgaaggccaggcatcagtaccgatctaccttgtagtgtggtaaatagactttggcatcagctaaattatttctgtgagactgaagtattttgatcgaaatagacaagtgagcaaagggatttgcaaaagaattctgttttctggcacaggcatctcaatgaggccttgtgcagaatctcacatccgagcgccccctgatggcaacatatagacacgcctcactttctgtggccaaattactccatgaaaggaatagtttctatatttgactttaagaccttatttctaatttatgttttaacctgggatgtgtttggtcaccacttatgtatttgtttttcatatttgtttgatttcaaattatctgtgataacagtattagattataaagtgcattttatgaagctattttaaaataaggtattttcaaatgtcatttaatgttttcttggaaagattcaaagtagtagagtgcttgaggagaaataaaagcagaggaggaataaaaggagatgaaggaggaggaaggggaggaggagaagttataaataaagattagcccctaattctaaaacattttttcttgatctaaatatatgaacaacgaagtccaaattatttaatgtttcccattgactataggatgaaatttaatactttagcctgatgtacaaggctcttaaagatctatccttgtctaactgagtccagagccaaccctacagctgcccaccttgaattttatgctctggaaatactaaatgattacaattacctaaatataacatagttatattcaggaaatacatatattaaatattatatatatatgtataatatgtaactatgttgctcatggatctgtgactgtgcacaccatagttccctctgtctggaacatatgtactgcctcttatcctcctgcaaatctcatccttttcaaggtaattctttcatttcagataaaatgttattctctctgtgaagcttggccgtgatttccctcaactcctgctctccacaagtttccactttgtactgagctcttacattgccttggtcattccctttctcttctccctacctatgttctgaggaaataaacaatgaagtttcatcttctttttttttttttttttctgagacagagtcttgatctttcacccaggttggattgcagtggtgtgattatagctcactgcagccttgatgtcctgggctcaagagatcctcccgcctcagtctcctgagtagttgggactataggctcatgccaccacagctggttattttctttgtagagatagggtttcgccacattgcccaggctggtctcaaactcttgggctcaagggatctgcctgcctcagtctcccaaagtgcttggattacaggtgtgagccactgcgtctgactgaagtttcatctttctagtccagcttagcacaatacttggtgcaggtgcgtaagacatatgtgttaaattgcatacttcccatttcctgaatggaggtgaaataaaggaaacaaaagttaaatacatttttcaggagatacagaaatttgtaactcgctgaaaaagtagctttttattaggactttgccttttaaatcattacacactttagtctttcctcttaaactaaattactatttattattgactttacagaagaagaaactcgtgtcatacttatatgactttttggaccctggtgacatgtgactaataggtaaaaagaacatacaatgctgggagcaatttgtccagtggcccaattttatatgatgcctcaaatgaagtgctgtttatgcaatgaagtgcgtttcttgctttgttagtagtcattgagcctctgcacacgtaaatgtgtagggaatgaccattgagagacaaagtgtttgtgatgttacccatttatagggtatatcaatagttcacatttacggcacactcctttgaggccaggcactttacacacactgtcacaccttatcctcaccatcacagtatgacattaggacaattatgtctatttgcagatgaaactgtgactcatagagatcaggcgatatgtcaagattattcagatagtaaaaggcaggcttgggttcaaaatcaggcagtctggtttacagagcctggccattttttagggcagttgttctcaaccaggggcaatttttcttcttgggatatttggtaatatcagaagacatcattttgattgtcacaactgggagagagggtgttgctggcatctagtggtagagtccaaggatgctgctaaatatctcagagtacacaagacagtcaccacaactgagaattgtccagcccaacatgtcaataatgccgaggttgaaaagacctgttttatgataataagccaggtagaattcatgacaattgagtttatacaccaaccagtccttagcctttgctgttttccgcctgttgcatttctttaagtgtcatttattttcatggctttgactattaactctatagagatgatttccaaaaatcaaatacagatgatttctagagagaacctcaacctctccctcgaattctagcttcttattttcaactctcaggaggccatttttatttgaatgatttgctgaccgttccagtaaattcaaagtaactgttgctcctaatttctccctctgtggctttgtcctttttatcctagatactgttattcttttcgttagccaggaatgaaactctgatttatttcctcttctcttttccatagttctcctgacttcctcgtctccaatcagttactgaatatgaatgacctttccctacacggcttttcatagtatattcctattttcccttccacaatgctgacctaggtctttttcacctaccatgtggtattactgtaatcatgttccagctaatcttctgactccattattttcctctttcaacatgatcctgcacaaccacccagttaatctcctgaactaactctttggccatgtatccttttgtagtgcctttctgccattgagttcagtgtggattgcatcttgtgtttaatattcttcaggatttggcctgcaccctgtcatcttcagttgagccaactccttgcattctctgaagtgtactgtgcctatttctgcctcctttcctttgcccagcctgtgttctacagaggatcaccctagctactccacacctacacaaaaatatcatattcttaagacctgatcttgaccatttaccttcactttagttcttcctgtttactgcgccattcaccctggtcctaagtcatatgttctttctttgtatttttatttgaatattttataggaacatactttgtcatcccaactggacagttagtttttgcaaaggataactaatacattttcattttctttctcagcacctgatatcataacttttttgaataaaagtctaactgtttgatcttggtaaatgtaatcattttgagagtttatcatgtataaaatgataaaagttgtaatgttgctgttctacaaagcctattaatattttaccaatttgcaaaggagaactaatacatttttcattttctttcccagcacctaatgtcatagcttttttgaataaaagtctaactgtttgatcttggtaaggtaaaatgtaatcattttgatggtttataatgtataaaatgataaaaaatgttatgttactcttctacaaagcatattaatattttcccaatttgaaagataatccataatctgtcgagtttctagagaatacatgaaaatactaaaactaaagtggatagagtttatgtgagtattatattcagaatcagtattaggggattaccaaaatcgttacttaaaccaagataaacaaaattaaagaacatacgatttggtggaatagaaaattgtaagtttaagggcagtggctaaaactggaataatttatgttctataaggggaatggctaaataaaattaaaaacacatttttaatgttattgatagaaaattaacccataaaaattggtgcattggtcattatttagactaatctgttaaagttgattatcgcacaatcatattttctcttagataaaagatttatgatacttagtaaaaatggagcagagatttcaccattatattatataattataatttcagtgaatcaactgcaaattcatcaaaggctatttacattctgcttcacttaaattttccagttttattttccagaatttttctttacactgtgccctgcactccaactagactgaatgaactaccactactttcttcccatgatttcccatatctacttcctctgttatttcttctacccagactgcccttcccaatagttttctctgtgtctacacaccttcctgacaccactcaaatatcatctccaccaccaacttgccttgatccctagaaataatcagacccttttctgaacacccttaaccatttattactattttgtggcacttatttcactcccacatccaatctgtgtgaatgggcatgacataacttttctaccaaacaatatttctttggggaaagaattgtctccagttatctttttttccctgatcctaggcaagcaaggccattgcaattgccgcacaaagggtggaaattgagctggtttcaaagaccagattcggaaacttgaattcattttctctgtttggtttcttctttcatacttgcttttcccacttggctggagctggggcctaggtagattcaggcttacatatagccatatgaacagaagggaaagaaaaggttttttttttctgccaaaacttttctattttagaaaaatagggaagggctttgttaactgtgacttggggcatgtgctcatttctggagcaataactgcagccaacagaatatggtaaaataattcgctcaatctgggctgagatacactccttaaagtcaaggactcctgtctgttaccgaagtagggaaaacagtgctgggcagacaaagaaactaccccataaaagtagaagatatctttcagagtctcaacacatataattattggcagtttctttaattatttttttctatttatttactattgaaattggattgcatattaaattttggatttagttttcttacttatcattatagtcagctttgttgcatggtcttatacattcttcttaacatgtgtggtgctcttcataaacatatgaggtgctttggaatagtatctcctgaacacgtcaagatatcaccaggaaacaaatttgactttaggtcacatggccacttttctgtctccatcacaccggttttctagctggtcagagtggggatagagtctaaaggggaaattaagtatcatgtgagctttgaattatgtaatgttaacaaatgtttaacattactattttctagagtggatttttgtaggaacactttccaacttgtatgcatgtttcccattccacatagagttcaaaatgtgactacttacagactgctttccagttagtatatttaagataaagaagcctacattacacaccttaagaatgtaggccatgtctacataataagaagaacatattttttaacttttaagtccaggggcataagtgtaagtttgttatgtaggtaaacttgtgtcatgggggtttgttgtaccgattattttatcacccagatattaagcctaatacccattaattattttttctgattctcttcctcctcccaccctccaccctctgaaaggacccagtgtgtgttcttcccctctatgtgtccatgcgttctcatcatttaactcccacttataagagagaacatgtggtatttggttttctgttcctgcattagtttgctaaggataatggcctccagctccacccatgtccctgcaaaagacaagatcttgttctttttttatggctgcatagtattccatggtgtatatgtaccacattttccttatccattctatcattgatggacatttaggttgattccatgtctttgttattgtgaacagtgctgcagtgaacgtaagtgtgcatctgtcttttgataagaaataacatcatacatgcaaacagctgctagcatgtctttgttaacactttttgtggcttaacatctttactaatatttatgattaaattcaatcctcttatttatttcccattatagaaacaagtagtgtagagttgtacgagactcctgaatttatttagtccaatgtttcaagcttttcagaggtttattttacaaacccatagtagtcagtcatgatactttggtttaaatacatctgatcctatcttcatcttgctatggggaactttctgtctcaccagtcagctttttccattgttaggtatttctgattgttggaacttcctcctcccaccagtctttttcagaatctactgtcaaatctgttctcatagcaattataatttttctttcagaattataattttaaaaatttgcacatttctgagaggtcttcaaaaagttcctggaaaatgtgcattatgaaaaaaactgggcatcacttaaaaaaatttcaccaagataaacttgtactaacttcttgtaacatgtctgaacaggatctagtttgagacactaagaaggataagacattggtttgaatagaggccctatcagagcaacatgaattctattaaaattgcagcaagaacaaacatcaaatttatggtgaggcttgggtagaagaatggtgagatcattgattctttatgaaaagaatggggacaatgccccaaagaaattagcagtttataagtagaaaactcattttaaggaggaacaagaagatcttaaagatgaagcctactatggcagaccatccacatccacttgtgaagaaaacattcatcttgttcatttcctaattgaaaagcctaggttattaacagcggaaacagtagctaacaccacagacatctcaactggttcagcctacacaattcttactgaaaaatttaagttgagcacactttctagttgatgggtgccaaaaccgtcgtacctagatcagctgcagacaaaagcagaactttcaatgaaaattttaaacaagcgggatcaaaatcctaaaacatttcttagaagagttgtgacaggagatgaaacatggctttaccagcatgtaccatcctgaagacaaagtacaatcaaagcaatggctaccaagagcaggaagtggtccaatcaaagcaaaagcagactggtcaagagcaaaggtcattgcaacagttttttgggctgctcaaggcattttgcttgttgactttctgaacgtccaaataagaatagcatctgctaatttagtacagtgttttgagaaagccaaatttttagcagaaaaatgcccaagaaagcttcaatagcaagatctttttcattatgacaatgttccttcttgttcttctcatcaaacaagggcaattatgtgagagttttggtggcaaattattaagcattcaccttgccatcctgatttgacttcttctgacttcttattgtttccttgtcttaaaaaaatctttaaagggaatccatttttttcaattaataatgtagaagagattacattgatatggttaaattcccaggaccctcaattctttagggatagactaaatggctggtatcatctctgacaaaagtgtcttgcacttgatggaacttatgttgagaacaaagtgtgtatttttaatttttatctacttgcccatgaagttcatggagtgcttttagatctgtctttttctctgtctgtttatctatctatttatctgtcaatctgtctacacacccatgcatctactatccacctacctaccaatcatttattcatataaatttgtttaaacacctggaaaaatgattatatctccctcttgccttctctttacgtattgctaactatactcagatatttgagtcattcttagtatgatagttttcttactgttgtccattcctgtcttattttttaatgttctggttcttttagaaatatgttatccaaagtaaacccactgttcttgctgtaggagagagttcactgggcctttccatgctgtggtgtggacttttacttccattgtagatatagcagaaagagctcagtgaccgagagcctgactgcttggatttatactctgcctccacctctcactggcaatgtagctttgggcaagtcacatatcctctgtatataatttttctcatttgtggggtgcagatataagtggtggctatcttggagggttgcaaagaagagcacttccttggccaatagtgtgccctctgtcatgaatatttccctgctatcattgtaacttaacttttgttgctattttaacaaccaaatcatgactatttgttatcacttctgggcctttaaagttgctgcttttcccacctagagcattttcccccaagatagtcacagggctggcaacctctaatcttttagcagcttgaatgtcattcctcaaaaaagcctccctgactgctggttctgcccttgccctggtcactctctagccctgggctttatttcattttctttatggatcctatcaccatctgaaattcttcactaatttgcttgattattagctttctccctctgctgaaatgtaacacatgtgagaccagagcctccttagtctcatttaccaatgttaacagcaaccagaatcgtgcctagcatatagcaagtgcaccagaaactttgttgaaaaaatgttttgggtccatgaaaacttccaaacatgtttcagatgttcagatgactttttctttttaacttgctctcctccaccccatatcaatgcaatggatatttgaaaactaaatccagaacctgaatttatcctcaataaatttgacttttcatattccattcagagttctggtattcctatattgttttcaatttaatgctagactttatattaattaagataattttatggtaacaataacattatgcatgcattgagtgtttgctacatatgaagcacttataaatttttacatataatctcatttaatttttaaaacaaccctatgaaatacataacatttttattcccatttttataaatgagaaagctgaggtacaatgagggctggtaattgggcaaagtcccacagctagtaagttatagagttgggatttgaacccaggccttcagatatcatcaactgaataattcatcagtgtcatgaggaattttctgaactttgtatgacttgaaactttgtgatgttttgtctgtatctatatacaagtcatgataagatgcctcataataataccaagcctctgtgatattccagtactttttattctggttactactgaaccaagaattattatattttagtcatattgtcaatgagttcactacccacagagctgaggacataaggctgctgtggaaaagggagtaaacacttattaaaagccaggataggcaatgtggcattcctgtaaagcactaattagtattttcagcagaaatatgttttaccaaacctattttgctgtcatttgaaagcatgttattttctgcatgttcacatttcaccttgcttcccagagtgtttacagcaacttgccacagtaacacatactaaaataatggtatgatacacaagtaagaataaaaaatgtgatctagagaaaaataagagttaaacacaagaccctagggtggaggatggtctgagagagagataaatatttaggccttaaggaaccacacacagttcccctggttgagccacaaattggtatgtttttttccttatgtacaggttttttttttattatactttaagttttagggtacatgtgcacaacgtgcaggtttgttacatatgtatacatgtgccatgttggtgtgctgcacccattaactcgtcatttagcattaggtatatctcctaatgctatccctccccctgccccccatcccacaacagtccccggtgtgtgatgttccccttcctgtgtccatgtgttctcattgttcaattcccacctatgagtgagaacatgtggtgtttggttttttgttcttgcgatagtttgctgagaatgatggtttccagcttcatccatgtccctacaaaggacatgaactcatctctattcttttattagccaccaggaagctttaaaaaaaatacccagaacaaattggtatttttttttaaagcttcctggtggctaacaaaagaatagagaagcaatcagttcttactgtcagttagaaaaagctatcccagttattcaagagaaacacagtatagcttgagactatatgtctccataggcctttttgtaagaagtattcagtgatataatttcccctatagcagacctacaatgaactgcttagtttcatgtcactgctgctcatattgtcctttgctaaaagctgagaatatgacactaaaacgagattcaaggaaagaaaatctgtaaaggatggaaaacgcagatagtatgttcaaaaggttagatagaacttggaggatcatttattcttcttacatcctccataaatacatagcttacctgggattttgaataaatgtgggcagcagaccattcaaagtaagattatctggaaagtgcttggagtttctgagtggtttgctgttggatccatttgttttagaaaatgaatgagaatacatggaggattatagccttttctggaaattaaggacctaaccaagttttttgttttttgaattaaagggccctgtccatatctatatataagtgagaaactgactttattggatgtctctagtgtttattcattccttgttccttcgtttattccttcaacaaatatttattcagcccctactatgccctagatacctaagctatagcagtgaaaaagacaggtatgatctctccttcaatagagtatacattttaagaggcaaggcaaacactaaacaagatactaattatacagttacaatcttgataagatctactaaagacaagtacaggtcggaaagtaagcacaaaaatgagaaactcaattccatttttacagcttccttacattatagatgatgttacctctaagatttttttcttttttcttttcctttcttttctttctttctttctttctttctttcttttttttttttttttttttttttgagacagagtcttgctgtgttgctaggctggagtgtagtggcgcaatctcagtccactgcaacctccacctcccgggtttaagcgattctcctgcctcagcctcctgagtagctgagactacaggtgtgcaccaccatgcccagctaatttttgtatttttagtagagatggggtttcaccacgttggccaggatggtctcgatctcttgactttgtgatctgcctgcctcggcctcccaaagtgctgggattatagatgtgagccaccgcggccggccacctctaagatattaacagccttctaatcactaaatccaatgtcctcttctaatctttagaaatgttcatattcgttggcatgggaatataaccatgaggtttaaagtttctgcttgtgcctttgtttgtagcagataaaatcttttgtttaaaagaaataaagcctacttgaagtccataaagagaaaacagatgaaatctggactgctttgtttggagatgcctcatgggaaggtgggagctctggctttccccacacttggtaatctcaggatcgtcttttcttgatccccatggtgctagtttggaagccactattctagaattctcattattatcagctatttatgtattggctccctggcagccctaaagactctgcctggactgacacatcccagtcctattcccagttctgtgccggagtctctgaacacttcttgaactgatctgagccaagaaagaaacttggacatctttggatttgtgaaatccaaactggaccctcttcatttgctgtgatttcccacccatgattacagttcacactctacttactaccaggtctccaaccaacacctcatttattagtccatctcctgtgtgtgcatggattggtgagggaaattagaaggaaaggaagatgattgcatccatcaattgaatcaatgtattctgggctccaaatatgtgctaagcattgtccaaggaagctgagggtataactatgaacaaaagaaacaaaaatacctgcactcttggaacatacattctaatggaggatatagacagtaaatacatcagaaattaaaattgtataacaggtggtgataagttcgttggggagaaaataaccaaagaaaaaggatagggtatgtcagggtgaggaggaccaaggtttactactttaacgaatgatgtaaaagattgcctgagtgagaaggtggcatttgaggaaagatgggtaggaatgagtgatacaggtgtctgcaggaaaagcattgcaaacagaggaagcagaaagtataatggagcttagttaggagcctggtatgtttgagaaacaacaaagaggtcgtgtggctaaagcaaagtaagagatgagactagaaaagtggcagaggagcagatcctgaattgtcctgtaggccattttgaggactttgggttctactctcaggaataactgggaagaagagtgacacgatctgtcttcagttttgaaaagatcaccctggctactgtgtggaaaatggaatgaagggggcaacgggaggtgcaggaacatcatttgggagtggttgacacaaaacaagcaagcaataaggggaaggaggggggataatttgttcaagtaagcctctttctctgttccatttgattggaacaaatggtacaacttagcagaatgtccagtaatagaggagaaagcaaataaaaattcaaagatattgagatagtacctgagtggtaatttaattaatggaaaaggaaatctcagaaagagatgtttttgcctaagggctagttgtgaaagatgaccctgaggctcaataaattgccttccattgtcagtggtatgtgcgtgtgtagataattaaagaggtgagaataaaaatagagggaaaagtcaaggattgagttttcaattttagagtttctatatatggagtactgtgtggtttataaaacactggtatttaatatattttattactatataaatgaatgaactacgtttcccaaacatctttctacgtgtgaagcaaaaaaaaaaaaaaaaaaaaaaaaaaaccacacagaaaaaaaacaagcaagcaaacaaaaacagagggaacaagagtttagagaagtcaaagaaatagtattcaattttctgtttagtaccatttattcagtgttcagtgtcaatgaggttatgagaaatattctagatactggagatacaaatataaatgaaacacagttcttgcccttaagaagcccacagtcaaatggaaaatatatagaaataaatagcactgtaatgtgataggcagacaggattgcttaattctcactgaaagattcagatcagagttaccctctgtgcagcttcttgatggatgatggggagggccagcatctggggttggagaaaagaaaggtgggtctcagggaagaaattccatgtgccaagatacagaggggtaaaattatgtggccttttcagtatatgaaagcagtgattcacagaacttagatgatacaccttgacaagatactcaagactcccaagacaagacactcaagagagtgtcttgaaaatagagtctttaaggagtaattcaattaaaattatggcattagtgcagactgtaattcaatacgactggtgtctttgtaagaagagaatgtccctataagaagatactcaagaattccaagataagacactcttgtgtcttgggagaaattctcatcttgggagtcttgagtgtcttgtccaggtgtatcatctagtacagaaaatagctcaaaaattgtgatagccttgagaatatattttacattacttactgtcgaaactgggactgtttttatcacaaaaaggggcactattaataattacactggaatgggtataaattaaagcagtctggggaaacccaaacatatggtcaacctaatgatacctgttttcctgcataaaggggttataattgtactaatttatggtgcaaactgggtgctaaagctagtgatgagtttctctgctagaaaaatgttccaaagaaataaaccaagacagttaatgcagagttttggtagaagggataactacttttagatggtaggtcacagaagcttgtccgaggtgaggactttgggctgagtcctgaatacaaacagccagctatgggaagctccatggcaggagtgctccagggagagggaatcccaaaagccctttgtgggagtccttctgttagagaagacctgtttggatggagaatacaaaaccaggggggcttgggagatgaggtccgagacataaggagaggctagttcatgttcagccatgtacatgtggtggggaatttgagttttattctaattggtggaagcacagcaggtgatagagcatacctcacgtactagtttacaagggctgccttcacaaagtaccctggactgggtgacttaaacaatagaaatttatttcctcgcagttctgcagggtggacctcccaaatcaaggtcctggctgagttggtgccttttgagggctgtgagagaaggatctgttccagaactttcttcttggcttttagatggctgtcttctccctgtttctttacattgtcttcctgctgaacatgtctgtgtccaagtttcctcttcttataaggacgccagtcatattggactagggtccgccctcatgccataattttaattgaattacttcttaaagaccctatcttcaaatatggtaagcctctgtggtattggggtttagatttcaacatacgagtgtttggagggacagaattcagcccacaacacctcattaagcctggaagagaccgtaagaatattcgattaactggataagaagcacttaaacccaatttctaagaaaagagggataaaaaggtatactgtttccaggtatagtatgaaggtcatgatataaaacagaaagaagctttttagaagggaacaaaaaacactggggcttacttcaggagggatggtagaaggagaaagaggagcagaaaaaataactattggatactagggttattaccttggtgattaactgatctgtgcaacaaatcctatgataggagttcacctatacaacagacctgcacatgtacccttaaaccgaaaattaaagttaaaaaaaggaaagaagccttatacagaggactatatatagccttatataaaggactatattaagaattcttgtgagaagtcattatttaggtgtcaggcatctatagccatttaaacagagtctgtgtgtaacagtcttgagctgctgatgaaagaaggtgtagaagagtgttggtgccaagatctggagtggagtggtaggatcctgacctggagcacccaggaatgactgtcctttgtgcacaggtgatagacaaaactgggggaatgaggagttgaacatggaggtatatgaggaaggctcatccgctcttcagaaatccagaaacctaagtgtgaaaacacagatttgagggcctccacctgacttggtgggatgctcttcataggagatattctcctaatgtacattacaaagtcaatctaggagtaatgtaaaagtgatagttatcttaaacaacctgaatattttctagatatgtgattttgcaaaaataaaaaaaataaaaaaataaaaaaatgaaaaaaaaaaaaaaaggccaggcatggtagctcacgcctgtaatcccagcactttgggaggccaaggcaggcagatcacctgaggtggagagttcaagacaagcctgacaaacatggagaaacctcgtctctactaaaaatacaaaattagccgggcgtggtggcgcatgcccgtaatcccagctattcaggaggctgaggcgggagaatcgcttgaacctgggaggcagaggttgcagtaggccgagatcacgccattgcactccagcgtgggcaacaagagcgaaactccatctcaaaaaaaaaaaaaaaaaaaaaagagagagagagagaaaagaaatatctgtgttaggaaaaaagctaggaaaagctaaattctggtcatttcataataaaacgaataatgaaacaaacagaaaaatattttatgtggaagaacagaacagagaccttgggcagaagtaaccatgacacgttggggtttgtataagtaataaacgctgagatatatgccttaaactttagactgtctgagatcagtttaaggcaaagatagaatattatgactaaagagcgtaaaatgaactgctgagcatgcaagtaccataaaaaggcccttccttcagaattgagctgatccatattttttctcttgatttcattttctacttaggaactcagttcttgacaggccacatatacaatgaatgtcccaaagattgcaatactgtatttttactgtatattttttatgtgtaggtacacaaatatttactattgtgtaacagttgcctgcagtattcagtacaatcacaagctgcacaggtttgtagcctaggagcataccatatagttcaggtgtgtagaggttacaccatccaggtttgtgtaagtatgctctataatgttcacacaaagatgaaatcacccaatgatgcatttcttagaatatttcctcatcgttacgtgaagcatgactatgtaagcattgagaatatgaatacacatgatttccaccaagagaaagcatgtgatcccaaatataattggtaaactagtattaaaattttttatatgtctttctcaatatctgttatatgagacacacttgtttcacatagaacagatgaactatttgttttccatcactagaatatttttcttctaaaacttttgacctatttgggattgaaataaatgacttctaaatttccatccattgctaatatctgtaattctgtgtattacagataattggctaattacctgagtatggtgttgcttttttcaatttataacagtttagaccttttaggatacagttgttgaaatatggcaccaaaacactaagcatcttatattgatcgtgtgtcaatttacctaaccttggcaattattttcaatatctattttccaaggaaagaaatgagtagttattatcaaattacacaagtggagaagaattggagtttaggtaaatattttgttctaaaatatcaaatggtcatttaagctgaattgggataaaacaacccctatgaattttgctggatggacaccataaatgacagcaaccctgttcttctgttttcatcatagtcaaaaaatgctttagagtttactacttctacatatctcatttagttttcataatggagattttctaatgcatgttttatagatgagcaaacaaattgaagatgttaagtgacttgttcaaagtcatatatgtgaacacatattgaacataacttatttggccttattactataatggtcattagaatatctttaaaaatataattttttaatcaattgacattacacaatttttatttgaagctttcaaaattaacagtaataatgttattttattaagcacttattatatttcagtcacagtgctaagcacgtcacagtcatcatctaatttactcaatctgaaggtatgccattctctgaaaatggcaatatacgcttacaattatttgtagcatagcattctacactaaaaagatgaaataaagaagttgaaattttctttatcaattaggatagctaatgatcttctgtggcaacaatcagcatgtcttacagcttaaaacaacaacgtttacttctcatccaccttacatcctatctttggtgtacctggagctctgtctcatgtcgtccccactcagagactcacgctgatggagcagccacaatctagagcctggcctgccacagtggtagaggaaaagacagactggtgaactgtgcagtgatccctaacacttctgcccagaggtgatgccagtcaccttgatcgaagcaagtcaatggctacatcaaatatcaaaaaagtgggaagtgaaatcttaaaacaccccggaaaatactggaaatttttattttagttttacttgaaaaaagtataaattttgattttctgtattaaatcacttattcaaacaatgatttattcaacagaaagcattgaacactgtatttcttttctgacaaccacttctccaattctctgacaccaactgggtgcccaacaattttattcaattctgatactacctggagttagcacagatcccccaggttaaggactcagtctcacaagacttctgctactctagacaccagacactgtacatggagtgctcgggctacccacagttttgtgcagctgaccacaaattgggggttctcatgaccccctccacccctcagtttccataattcagtagagccactcacagaaccacgacatgttctttatttgcaattattggtttattataaaggattcaacttaggaacagccaaattgaagagatgtattggacaaaacatgaggaagaggacccagagcatagatgccctctcctggcacactgccctgccagcatgatgatatgttcaccaatctggaagatcctcaaaccccatcttttagagttttgtgtccaggattcattaaggtagacatgattgattatacattgcccattggtgattgaactcaatctccagcccttctctccaacccagatgtcagggacggggaccttcagttctgttcctctaatccagtagtttttaatgtaatcagtcctcatcctaaagcaaaaagctacccttttctcccccatgagttatttcattagggatcttaaatagaagactattccttcagaagattttaggagctttgtgccaggaagctgggagaaagatttttttgttgttgttacactacacacagccatatgctgagcttggtgcaaggcacgggggatacagtggttaatggagcagacacagtccttgtcctcatgaaacttcaagttaggcaaactcattgaaatgaagatcagtctagagaagttagtaaaactgaaacaaagataaataaaacatgaacttgattcacagaaacacttacctccatatatgaataacatcaattagtaaactgggaggaggaaggaggtgctgggtgtggaatggacgggaaaaatggagaagtcaacactgaatttctaatcacctaaatcactttaagtctcatctttttgacatggtgatggtcaaagattggcacattattcttatcaaagcacaggatagggtgctaggtggaggaaccaggaaagattagtcagagaagatgccttgaaattctatgttagattgtcatctaggttatacagctcatggacaaaaatacatgcataaaatgatgcccacatggattaatggatacatgaaattttaaattcctagacaaacatataaatcaatgaattattaagtttatactagttgtatatgggactatttgatattgcttactttgttctttgaattttgcatttaggagatttgtagtatgagtttcttgcagaaatcttaacatttccttaaaaaaccacttccctaaaataatccttgaggaaacatatttgtcagaaatgttcacatcatattccttttgttctggtttatctcatcctccttgacttctccacatctctaagtaggaagttatttattgctgctgaagttgtaaccctggtgatttcgctatcaacttacaaatcacttcctttccatatgactacagcatgtaagaatgctgaggttttcttttctccaaataaggcagaatgcttcaagaatattttatcgtcctatatggatattctatacctttagagtgaacactttcctctattaaaacattaacagtcataatgagattcagtccaactggaccgagcttgtgaataaaacaagatgctccagtctgtggttcaaacattttgaacttcccagaatataattaggtatagaatatagttcttatctttctttgagaactttttgaattattgttatagtttctaaaatatcttttctattttgagggtaaggtcacaaaacagaaaaaaatgtgtatcagagtatgttgaatatggctgtttgtcagatcaagtttacgctgtgtatgggccttcgtccaatttagatgcagatggtataagggactttgaatatgctatattattattcagctgacttctccagtaaataatagtgttcttcaggaacagaaaaccaaacgccacatgttctcactcataaatgggagctgaacaatgagaacacatggacacagggaggggaacatcacatacactggggcctgtaggtggaggggagcagggggagggagagcatcaggataaatagctaatgcatgtggggcttaatacctaggtgatgggttgataggtgcagcacatcaccatggcacatgtttacctatgtaacaaacctgcatgtcctgtacatgtatcccagaccccaaaataaaattaaaaaaataataatagtgttctttagcgtctttcatgtgaatggaagttttgcagacattgtcacagcagcattttttcccgtgggtttccactaagtggtgccttcgccttgggggaaaggtgtctcagtcttattccagtctgcttcatttactgttgatgtgatgattgctgcctatgtagtatgtgactttctagggacaggcggtcaggtttttctggacccctctttctctgaggatctcttcaaaggaatagcctttggccttgagtgctgcctcgagcccacaagcaccttctcatggttgagcacaccctattgcttgactcagtgaaatacattgaatatcctgccaacactttttgttgtacatctctttgccctcaggctagctacagaaagaaaaagagagagagaatacatttttacatttcctgttcttcatgttgaatgaggcagtttatcttctgaacagctgctttgaaggtttgagtatgttcgatgcactaaacataacagcatagaaatgaaaaaaggaggttggcaaactaccttcttatcttcttttaaggcttttgaaggatttaagttgtttcaccttttagtggcatcacagagaggttgagatttcacttagagagaatggctttgatgtgctattttgtatattagtgaacaggttcacaaagatgccattctctaatcaatgctcctgctcccacaagacagaagagaattgaggaattaaggaaatgccaagaggtagaacatccagtatctttggtggagatcttgctttgctatgtttccttccttcaagttatttgatctgtgcgtgtgcctgagcatttattgtacaacagatactgtgctaaggcttttataagctttgtattgcttaatgttcatggcagccttgggaagaaggtactgttagagtaggaatgctactataatcttccaactgggttgacattaattccttaacctgctctttttgacttttcttcttcaacccattgataatctaattgtcctatatttctgtaaggttattctaaggtattttttgagattccttattaagaccattaatacggctgggcatggtggctcatgcctataatcccagcactttgggaggctgaggcgggtggatcacctgaggccaggagttcgagaccagcctgaccaatatggtgaaacaccatctctaccaaatacaaaaaattagcagggcgtggtggcacacgcctataatcccagctacttgggaggctgaggcaggagaatcacttgaaccctggaggtggaggttgcagtgagccgagatcgtgccattgcactccagcctgggcactctgtctcaaaaaacaaacaaacaaaaaaactttaatacgtgtgagtatagtagtgaacaattattatgggcttagtaagtgccaggttttatcttaagtagtttatgtgcaaacccgataacacccaaacaaccatgtaaaatagatatcataagccctattgtattttaaatgaagaagagatgataagagacatccctaagctcccactgacataaaatacagacaccaggatttgaactgggcccatcttactacagagcctcaggatttaacccccactcttccagttttcttcatggcctattgtcagagtagaaacattatttctattctgaacatgggctgtgctcaataaattattgcttcatctccttgatgataacaaaccattgcctttcttaaaagtcttttctaaaaaattttagcctagtaatttcaaaaaaaagtaaagcagtaaaatacgtcatcctgtaaagtctaaagatttgaaatttaaaagttttcaggctagagaacagaacttgatgtaatttctagaagtgaaataactcttgttaaaatcagatgctgctggtacgcaatccaaaagggattgtttagaccctagaagcttcaaataaattgagtctcagaaataggggggaattgagtcacacagttctgattgtttttgtcaacctactgaagaggaacaggagcacccttccgaaagagttcagagctgagtgtgagtattcacaagcaagaacctctggcacatcttcatctttataattccaatagcaatggcaaacaagaagactcaatgtttaacttcagatttcattagacggagagccgtgtttacaatcagctgactcatttgagcgttctgacaagctctcaatcctatctggatctgttaggttgtcttttaaaagaggaaatatttcaacagagataatattcctataagctgtgaaagtctgtctagaaatcaattgttaagcaacctatagagtttagagcagaaaaagctacaaaatgaagtaaatttttatagtggtttctagtgagaaacaatgtatgccctaggtgcagtgggccatggagaacatttattacattcttcttgtatgaacactgatatacgaagaaaataaaagctcagcttttgccttataacactacacttgccatggtacacttcaaaattcacacatgcatagggagattatttacacatgtgcaaaactaggaaaataaaataatgtgaaaacatactagttaaatgtgattgtgcagctcttttacttctattctggattggtgtttttgccaaaccctccctatgtcaacacaggtgacccctctgaaaggaacgtgccaattatagttgacaaaggggcttggtgcactgaatcttgagaaatgatcttgaatgacctccaggatttaaatatagttattgaaaggggccgaaccaatgagatgattcacagcttccgcatggagccatctctatatgctaagtacgaggccagtcctcataaaaacccgccaaggagggcagtagcaccattgttaccagcacagactcctccctttcctagctgtgtgaccttaaggagaaatatacactccagaaatctgctgcttcttctctgaaaagggcacaacaatagtcgcccattgtagagaggattaatgggataattatattatgtaaaactcactgaagtattttgtttacatagggactattcaataaacataaaaattataattattacagttgttataattccccttttacagctgaggaaactcccaagaccacagaataagtggaaaagttgaaattggaacctacctctttttgactccaaatgaagtgttctttttaataggtacagtagttcccacctattcatgagagataccttccaagacccccagtggaagcctgaaaccacagccagcaccaaaccctatatacactgtgtttttcctacatatacctatgataaagtttaatttataaattaggcagagtaagagttcaacaacagtaattaaaaaaatagaacaactgtaaaaataatcctgtaatgaaagttatgtgaatgtggtctttctctcttatatatttctggaatattccatttaatatttttggactgaaactgtggaaagcaaaacagtgaataaatactgtaattagtgttcattgataacataattttggccaagtgcagtggctcacacctgtaatgccagcactttgagaggccaaggtaggttcatcacttgagcccaagagttcaagaccagcctgggcaacatggtgaaaccttgtctctaaaaataaaataaaatacaaaattatatatatatatataatgtatatttatatataatatatatttatatataatatatatatttattatatatataattatatattatgtaatatatataaaatatatattatatattatataattatatataatataaaatatatattatatattatatatatattatatatattatatatataaaatatattatatattatatatttatatatattatatattatatataatttatataaatatataatatattatatatataatatatatataatatataatatatttatatatatatataatatatataatatatatataatatataatatatttatatatatatataatatatataatatatatataatatataatatatttttatatatatatataatatatatatgccaaatgtggtgatgcactcctgtagtctcagctactctggaggctgaagtgggaggatctcttgagcccaggaggttgaggcttcagtgagtcgtgattgtgccactgcactccggcctaagtgttggagtgagaccctcaaaaaaaaaaaaaaagtttttttcagaattccgactatatgccaagcactctgttgggtgctgatcaacaaggtagactaagtctttccttatggagcccacattccagctgcctctgacaatgcttttccccatggcactcagaatcctgattcctgagtcctacagaacattctgtaacttggtaattctgaggctgccttggggaacaagcgtaaggaggagggtttcctcagagcagaaaggagggaatgtttttcctgcaattagagagtgcagtgacagtggcaaccacagtagcctcatagagcaccagggatgacagggaagaaagtgaatgctgacctcggctgaaacagcgctggcagcttcagcagatatattacatggtacttaccattacttcatacagtgttgagagttttggctcttgagcagaatttctgggtctgtattttacctatgctgctcatgcattttatgatcctatgtgggttatttaagctttttgtgcctcatctataagattgagaccattatgatattgatttcataggtactttgcaggcaggattacctatctgagagaaacttgatttatttctttgatgcatgcaaacttaagcttgccaatgctcatatttgtgcatttttccccacacaggacagtgcagtcgttaaggcaccatggttagtgtcatctctacatgcctcagcctatctcaaggtctcctttggacagtttgcaaatgagtgcctgcctgagtctctatatctgagggagtcctctgcctgggggagcttatctgcccatgctcaagacatgagggctagaatttgtagataaatacaacagcttccttgtcccttggagatgattctcagacatattccacaatctctcagaggctccctggtggtaccaaatcccagttgtccacagcaatagtggggttgttaaccagctttcctcccttctctgtctcactgccccacttcctcaatttgctctctgggatcttcccccaaataaatgacatgctcccaaatccttgtctcaaggtcttgttttaggaggaaccccaggcaaaggtagttacagattttagagcaggacttcctcctgcaaattctgacttcattacttacagggattttttttttaatactttaagttttagggtacatgtgcacaatgtgcaggtttgttacatatgtatacatgtgccatgttggtgtgccgcacccagtaactcgtcatttaacattaggtatatctcctaattctatccctcccccttactcccaccccacaacaggccctggtgtgtgatgttccccttcctgtgtccatgtgttctcattgttcaattccaacctgtgagtgagaacatgcggtgtttggttttttgtccttgcgatagtttgctcagaatgatggtttccagcttcatccatgtccctacaaaggacatgaactcatccttttttatggctgcatagtattccatggtgtttgtgtgccacattttctgaatccagtctatcattgttggacatttgggttggttccaagtctttgctattgtgaattagtgcctcaataaacatacgtgtgcatgtgtctttatagtagcatgatttataatcctttgggtatatacccagtaatgggattgctgggtcaaatggtatttttagttctagattgaggaattgccacactgtcttccacaatggttgaactagtttacactcccaccaacagtgtaaaagcattcctatctctccacatcctctccagcatctgttatttcctgaatttttaatgatctccattctaactggtatgagatggtatctcactgtggtcttgatttgcatttctctgatgcccagtgatgacgagcattttttcatgtgttttttggctgcataaatgtcttcttttgagaagtgtctgttcatatccttcgcccactttttgaagtggttgtttgattttttcttgtaaatttgtttaagttctttgtagattctggatattagccctttatttaatttttattttgagttcaggggtacatgtgcatgttttttatatagataaacttatgtcatggaggtttgttatacagattatttcatcacccaataattaagcctagtacccattagttatttttcctgatcctcttcctcctcccaccctctaccctccaaaaggccccagtgtgtgttgttcccctctatttattcatatgttcacataatttagctcccacttataagtgagaacatgcagtattcagttttctgttcctgcattagtttgctaaggataatggcctctagctccatccatgatcctgtaaaggacacgatctcattcttttttatggctgcatagtattccatggtgcatatgctttatcaagtctatcgttaatgggcatttgggttgattccatgactttgctatcgtacagtgcttcagtgaacatacacatgcatgtgtctttataataggatgatttatattcctttgggtatatatccagtaatgggattgctagatcaaatggtattcagacaagcaaatgctaaggaaatttgttaccacaagaccttccttataagggaagcattaaatatggagagaaaagaccattatttacagtttttaaattaaggaaatgattaaacacttcattatttcaattttctcatgtctaaggaaggtatgatgataaaagctacatgatattttttgtgaagcttagctgaaacagtacctgtcaagtgcttctagaccattgcaagttttcaataaatgttagcttttattattattattattaatgtcagcctaccttaaaacttctttaaatagatggcatgaacagctgtagataactgcagggtgtaaaaattctggcagctttttttatacctgtttaaactctttgagcttaacgctcttcaagttccctgctggcctgtaagtaatagaccaatgtcagtggaggagacatgtagatgttaagaatgaactaagtttgtaaggtaaaaagccaggcttcctatatgcctcagcagatggtctgataaggacgctgagagagagtatcatgaaatagaagtgaagtggattaacaagaaaatccatgttcctggcacactaaggtgataagtaaatggttttctgtggctttgctaaaattttgaaaaattcagttagcagcaccgttgcctaaacatagtatggtatgttaagaaggaggattctaacaagcacttgttaagtgcctattgtaattaagacaaatatgatttggtttgtgctctcaagtctggtgggagagataggcatgtaaacagatgaattacagcacgaagtgctactgctgcaccaagacaggcaaataattcacttaagctaaggcagggaagaaagaaggaaggggatttttatatacttttatctgcgctgaaggtggctttacagatgaggaacccgaaactcaaagaatgtatgtcaattcattaaggcatgcagctgctaagtggggagccagcatttgaatcaaactttctttccccaaggttgtctccatcatgccaggctgtagtggtgacaggtggaaaggtgtagtgagccatcttctaggtatatctatccctgagagcaacaaatcctggtggttctctctgtatatagtcacagagctccagggcatgtagtacttagaattttgtttttgctcattgcacaggaaatggtatgaaactgaggtaattcatacacacataatttgaatataaagaagaaaatgatagaggcatctggatgacctgatatttaatatagtaaaaggaaaatgttttcctaagcaaaatgagtggtatacaatgaataagttgtggtcaggaaccatgtccccagagttttggcttttatcctttcattgattcacaacatgaatttttttttcctaaatatccttcactagaaggcagaattaatcaacctttgtaatttaacagattatttggatacaaaactaatgatatttttattcaaacatgtcaagaccttggggatatagcatgggatttggggagcaggttggttgttgggggcagtcgtctaaagaatcagtaacatttgagtgcctaaaatattaattattgtcctaccagcaatactgttctctgtccttaatgatgaattaagagattagaaaatagtaaaaaaataaaaacaaggacataatttccatgcgataatgataggactttgtgatatcacatttaaaaagtaggtgacttttatgagagaggaagtgaggaaaagaagccagcatttattgaatgcttgctgcaggcttctgtgccatgggtattaatagtcccattttacagatgaggaccctgagaatcatatatttagtgtcaaatgctttacctaaaagggcaaaagtataactagaacaaaagttcaatgcttaactctgaaaaaatctgttctctttgctacagaccatgccatcttggtgaaaatatcccaaaagatctggggttgagttacagtgccaaaggggagaggaatgtaatattgcaattagatgatgagagattgtcttaggaacactgaagtacactggcaaattttgggaagcagagataaattatgttgctaaaagccaaggaaggctgggcgcggtggctcacacctgtaatcccattactttgagaggccgaggcaggtggatcacctgagatcaggagttcgagaccagtccggccaacgtggcaaaaccctgtctctactacaaaattagctgggcatggtggcaggcacccataatcccagctactcaggaggctgaggcaggagaatctcttgaacccgggagatggaggttgcagtaagccaagattgcgccattgcactccagcctgggagacagagcaagactccatctctaaattaattaattaattaattaatttttttaaaaagccaaggaaatcatttggctagagagtgtgagcttgagaattggatagaagtaggggaagttaggctctgtggcactgggtggtggaaagtctgcagtcagcactttgatcaggtcaaacccagtaatatttttgaactcttatttttctctgtcaggtgccagcaagcaaaactgagtaaggaaataatagtttatggccttatattttagttagtttgagtacctgttgacaggtggtccaatttttgtgtttaatttagaagaaattctgaaggatgaggtttaataatcacaattgaagtagtggatatgggatcagagtctgattgcattggatacaatattccaagatcactgaatgatacaactcctgcaaaaaggatgctatgacaatataagcataaagccgcagggaagtggacagaggtcttaagggttggaaaaaggagtgggcacatttgtgaaatgtagcagagctatgggatttggactttgcaatgtacttgtacagtaggactaaagcagacaagcatagaatgcatgccattaattcttagccttgaggcataccttctcaataattaggagaatgaaaagaggtgttttttatatatccttccacctttatatatattttttattgttcaatgaagtagaaccctgtataaagaggagttcagggaatctattaaaaatccagggtaccttctatgtcctagtcagagttcttggagttgttgaattataaaaatatgacatcccaacacacactgtagggatcaaaacctaggtgtgtggcaggaagatagctcataggcaattccaatatttgcagttgaaatttggcatgaaacactgacaatttgcatcgtctgtccatccttcatgagctgatgatgcccaatgcttgtctcacatggcaggtctcacttcgtactgaaatgatgaagttacttctctgcctccaacactagattgtgtgttgcctgagggcaggagcaatgtcatcctttttgactttctggcacttaaaacagaatgtggctcatagttggaggtcagtacatatttgaatggaagaatgcatgaaaatataaacgttagactcttcccttatggttattgttttagtttataaagtagatgtaaatatagcccaagataacatagcaatttggcaattctccatgaattttctgtaatagaatatttcagtaagcacagtatacttcctgttttaactttgtggctaactgatctttagttatttgacagatatttttctggcaggcaatgcgctaaacattgggggttctctgcaactgttttttattttaagtggtaaagttgctcttttaattcaaatttgttttttaattgacttataaacttgtatgtatttatagtgtacaacatgatgcttcgaagtgtcaataatcaaatggttaaatctagctaatttaatcataatttaaatagctagatctaaccattttgttattgacacttcaaaacacacaaacacacataatgaaatggtcaaatctagctaattaacaaatacattacctcacatagttatcatctttatggtgagaacatttcacatccactctctgagcatttttgaaaaatacagtatatcatcattaactatagtctctagactgtataatagatctcttgaaattatttctcctaactaactgaaaatatgtatgccttggaccaacatctccccactccccacccccaaccaccccagcttctggtacccacccatcttcagctgtttgtaaatacctacggttgatgaggaaatgcatttgttgaaatatactgaagcctgtggattattgtaataatccttttatgctatcaaagatttactgctctttgagcttaccttagttgggtcttgtaaattgagtgttatttgagaacagaacacaggagggcaccagaggacaagaaaacgacaaccaaaaaaaaaaaaaaaaaaaccccaaaaccaaagcactgaacttctggctctagaatagagaccctgctaaatgtatcatctctcagcagtccatttctattaagtcttattctttaaaggccatgaggtatttgtaaacacgagagctttccaaactttcattaaaggaaagtgtccctttcccagacaatgcttccagctcagtcagatgcccaagcatgaccagaaggagacatggatgaagagaacccagggggtgtctttgcacacatgatgctctaaagcattttcagatctcctctatgggcccagcaagagtgctgtttctgaggaagaaggcagattgctggacggattcacaaaccacggcagctccaactctcctaccgatgcctttactccaggtgcctcagccagtagcaacaggtctccctgttggtgatacccaagggcaccatttaagaagaaataaaaaatgatgagttcatgtcctttgtagggacatggatgaagctagaaaccatcattctcagcaaactatcacaaggagaaaaaaccaaacactgcatgttctcactcataggtgggaattgaacagtgagaacacatggacacaggaaggggaacatcacacactgggcactgttgtggggtggggggagtggggagggatagcattaggagatatacctaatgctaaatgatgagttaatgggtgcagcacaccaacatggcacatgtatacatatgtaacagacctacacgttgtgcacatgtaccctaaaacttaaagtgtaataataataataataataataataaaagaagaaatagacaatgggcttaagtgttcactcacctcctgtgcttccctgggcctacggttatggctcctaggcatatgggagaggttgagtcagtcactgtggcttagaggctgcagtgccttatcaatttctggcattgaattatgactagaatttgaaaaacatcaaacatggcttccatgacatcatagtctcagctcagtatgtcactgagaggttgtagtagtttgcagatgacagtgatcaatgaaaacccaatttatttgactcaaagggctgtggatatatgtacgtgaaaatgtattctacagccctaacctgctgcatctggctctggaattccaggtccacatttctgagtatctgctagtcatttccatgtatagagccatcccttggtatctccaggggactggttccagaacttcaaaggaactcaaatttgaggatgctcaaatccctgacaaaatggcatagtatttgcatgtaacctatgcccaccctctcacatactgtaaaatcatctctagattacttgtaataaataatacaatgaaaatgctatgtacacagttgttactgtttcgagaatattgacaaggaaaaagttctgcgtgtgtttagtacagaggcaaggttttgagaatattttaaatccagagctggtcgaatccacagatgtggacccctcagatatgaaggatcatctgtttatcccaccatctcatactcaggatgtttaaaatagagctaatagctgtttctttctcaaacccagctcttcttttctttgtttcatctaaattaagtagcaagaccaagttttccaggctggaaaagtgtaagtgatcctcaactttgtccccccaccttccattcctatcattcagggggtcacctcaaccatctcttctatttatacctttcattcatttcactctgctatagagcattttgaattcaggatttatttacctcctttctaagtaagttgaatggcctttctgtgctttttctgttctggtcttcacgtaatccgcttcacattctttttaaattcacctttcccaagattcatcattgcttacaggacaatgtccaattccttagcattacatgcagtccatctatctttcctaccttagctctcacttcacagctcataatccctctcctccccaatgtacacaaacacacccacctttccactgtggttcatcttctggctattggttatattttgccttcaattacctctgctggatatggaatagcatagaagttatgcacatgggccctagaactaaactaggggtctgcaaactacaatcagcaggacaaatattccccaccacctcttttcataaataaccatttattggaactcaccaaggaactatggagaaacaaggaagaatttcactataaaagacgccagaggaaaaaagagtacatattgtatggttacatttatataaatctaaaaaatgcaaactaatctctagtgacagaaaacagaaccctggctgctagaggagcagggagaggaagggagtacaaagagccatgagaaaacttttgaggataatgtatatgttgcttatcttgattgtgttgatgttttaatgggtctactcatatatcaaaacttataaaattgtacaccttaaatatgtgcagtgtatcatgtgtccattatacttcaatttaaaagaaaacatggaaaacattcagcatccagtgtccccatagcctcagccacagttagcccgaagagttgcttgtgtcttgatagagagaccactgaagtaatttccacagttcagggttatcattccattgctagttctaagaatcttacccttttcatgcctttggtctctcatcaaagatgtaggatggctggacttactaatcttcaaggcacttttcaaatttctagagtctctctgtggggcaaagtggctcacgcctgtaatcccagcactttgggaggctgaggtgggtggatgacctgagatcaggagttggaaactagcctggccaacatagtgaaaccccgtctttactaaaaatacaaaaaattagccaggtgtggtggcaggcacccgtaatcccagctactcgggaggctgaggcaggagaatcacttgaacccaagaggcgtaggttgcagtaagtccagatcgtgccattgaaaaaaaaaaaaaaaaagaaacaaagaaaagaaaagaaaaagaaaaaaatttctagtctctctgatctccatttaacatgttcagtctacaagtattttggtggtacctaaacttattcaggcagtatgtctgtggtctataaatgtacataccccacctttgctgtagttgatgcctctgctgctgaaatttgtttcttttctaagtgttgcatccctctttgaaacagcaggggctcacctggcaaaacagtcctgtaagcagtagtggagaaacttggctgctcactgttcctgttttgagtaaattacccttcttaattgaacattatatgatttggcttcccaaatttgtgttcttcttttcaaaaatctaacagtaatagagtgtatttagttaggttcaaaatcatattttttaaaaagaaatgcaggaaaaaattcaaaggatgtttaatgagaatatgatagactttgaaatggaagatatcaccaggaaattctccatttcttaggactatataagtgacactgacttcacacagtggttttaaggttgagtgtactgttacaggaatatgtaagctgcttaaaacatttcacaactcatggtcagacaatgttcctttgagaggaaaattcactggcgtttctcaaaaacctgactgcttaaaatccaagtgacccaatgctggccttgcttatttctagggaaagttgccttagcaacctactagcattaagttgcttaaaggaatgtgtgtttaacattgttataagccagaaacagagaaaacagttaacatttagacaagtgattattactggcatccaggtaggctgttggaataaccaggatatgagttgctaatcgttcatttattaatcttcatggaattaaatacagaaaggatgaatacagaggagatcctgtgctggacacattctctgtgttagttcatttattcgtcaccatatccccttgattaaagtgatgatgagtctttccattttgtaacttggagagactgaggctgagagatgtttagatgtttgtccaaggtcacacagctagtacctgctggagcagaaatttgaagccatgtctggctcattcaaaatcctatgttctttctcacaccctgctggctcactacttattgtgaggcatttgaatgatcattcagctatttcctttacctgatgtttttagtttgctggcttcagtttcttagaggcaccctattgggccacatgagagattatagaattatgttgtgatcatggtgggctattatctctgcaaactctcctgacaccatcagtgcaccaggaaggttggataatcctacgtggatgtggagaaatctcaacctttttttatttgacattaggatttttttttccctctaggtggtgttttcactgactttgtggattgcaaaaagttgagtttattttagtttaacagtcaagaatgtggttctttaggacattttctctttagtgtgcctggagcttctaaatcttatttaaaccttctttttgaaatagatgttgcatatctttggctgtaagaggaagtcaggacttgttctctctgcttccagacccactccccagccatgtagactttatatttgaaggtccagagtgatttttcttttttttttttttttgagatggagtctcgctgtcgcccaggctggagtgcagtggcgcaatctcggctcactgcaggctccgccccctggggttcacgccattctcctgcctcagcctccggagtagctgggactacaggcgcccgccacctcgcccggctaattttttgtatttttagtagagacggggtttcaccgtgttagccaggatggtctcgatctcctgacctcgtgatccgcccgcctcggcctcccaaagtgctgggattacaggcgtgagccaccgcgcccggcccagagtgatttttctaaggcaataatctgaccctgtcattcccagcagcatgtagaaaatcaccttgacactccaggtacattcaagtgggctgccccagaggtcatggaacaaaaagcctcctagaccaagctaagatgtgaaattataaattgtttattaaatcaatttaaggtacactttaagcataaatcaaggggaaagtgattggttcaataaacacaggagagtgtgcaagtgggatagaaagactaccatatctcaatccttggttacacaatgttcatctaccttggttccctctctgccatattagtcttccctgctgatgaagtagttacaagaaccagagttgagattaagaaagggatacaacagctgggaaacactggtcctgttacaccattgccctcctggggagacacaagggcaagtatatctggccatagctatcacttgccaattagcctggtgactagatatatgttttatctctatgtatcaaccagagcaaatgtggggccagaatgggaccaaaatggatgtcaccaatgggttgaccagtttagggatgaaggagtcaacagagattgtctgagcttcataaatatttaaggtttactctgtactttcatccctttctatggggaagtaactctcttatttcatcctttttatctttgttcagcacacacgtgctctttttattttctctatgtctcacagctctcagagattatcaatttgctccctacgctttaatccattctataagttccatccaactttttgttgcttgctatgacaaaatcgaataatcttaaataatgcagcaaacacacgttgcagcctgtttaagatattttaagagttctttttgatctaggagataaaacacaaagttttcagtacagcaggttcttgtaagcaggttcttaaaatctcctcctggctacatctttagactcatttcctacctctcataaaaatgccctccactaccctacgacacggaagtactcgacatttgctgaacttgcatgctctcttaatctctatacgtggcagtttttaaaatctcttgtctacctggagcactagttctgcacattcattaaaaagcataagctttgctttctctaacaagtattacttgaacaccactatcttcttaaccccaaactcagacccaaatgtgcatgtatatatgcacacacacactcccaatagcttctctctttccctgtgttccttaggtataatgcaaagaactcatagtagtattaaagcacttaaaacattgtattacatttttatatcactctctactccattagactgtaagtaactttgatccagggatcaaaatatatttctccttttatctccagccactagtcaatgtccagtgtgttataaataagcagtaaatatttgatgagttgttgagttaatgagtaataacaaataaatgttattgtacaacaagttggcagatatttgttccttgaatagaatgatttttataattgtcatttacaaattcagtttagatgggatatttttctcttatttcttcccttgaacgttttcccccaactaccgtgtactcccattactagatttttttataaatcacttaaatatgtttttgtaaattattaatagcagcaagtagtgctgatctgttgggcacctaatgtgtatcaagctgtgaattagaacttgtcttccactggtcccaagagagctggatcagttcacaaccctgcataaatggtagctaggattatgattcagtaggagcatatgtagcctcaagcaggataattagttgtaataagcacataaccacattttctccctgtttctgtgttaggggatggcagtcaattcacactttgaatttcaatgtccataagctgcatttaaatacattcatataaatgcatgtcaagtaactaccatgtctaggccttggactagattctgaaaaaaataggcacaatcactggcctcgtggagttcatagccagcatcaccttaaaatcaatgagaagtagaaagtcaggttattgagaccaggatgatctacgctgcatctaactgggggatattaagttctcacagacattacaagcttatcccagtcaatataagctcactgtataatcaactacctccatatacaaatgtcccctcctccagtggcatgatctagggctggcagggattcacctttccttacccgtggtgcttctcaaaattcccctgctgcctcacccagccacccccattctcacccagtctaagtatcagttccaagaagcatttctagttcctctacccctttgttttccgcaaaccttcacatctgctccctcagaagcaccattggttatggaggtctgatctgaagttctacccatcactcacacattcatcatccatccagaaggcagttttatataaacccagataagcttggctttgcatctacttagtagctatttacccttggctgagataacttaacatccctgtttcttactgctgtcatctgtaaaatgggataaaaatgcttacttcccagtattctggggattaaatattaagctccagtacaaagtgtaacaatgactttatgcgtcattatccccgctggtctcccatagctgttctctagcacccctgtgccatctttgggattgtcgagttagccctgaagtggcaaggaccctatttcagtgctcatatttaaaaagcaccaccatcagcaaaaggggtgtagagaggaggcaccatttagaatcttggaaaatctgaaaaaacttgcttctaggccagagagtagagagaactgtgagattgtgtgctagccacagtagaccaatgttggattggagatgataggtcgtcttaatggaaagtgtgatggggagccaatgtggcacagtagctcagagtgtgggctctggagccaacataagaagagttaccctaacagaatatagaccacagagttcttcccttcaagtatggattcatcatacatccttcaaacctgccaagtacttcactttctttctctctaccaacctgcttcttaccaaccttctaaagtcctgttcttgattcaccctaggctcacctataaccttcagaagccctgtctctgactcttaactcttcctgtcttaacactgagcctctactttcagctttgggagccacaatgagtgtttcagagctgaagaatatctggagcccatatgtcagacatgaaagatttggaaaaacagaaataaaaaagttccttgaagtatttgaaatgatttattcaagtagggttgggacctaaaaatttgccaaatatatcataatgggggagtagtaccaggaacgtagagaaaggaagagaaaaattgatctcatagaaataaaacgtagaacagaggatactagaggctgaaaacaggagggggaaaatgggagacacagagagatttgataaaagacacaaaattacagctagatagaaaaaataagtgctagtgttccagagagctgcaggatacaacaatatacagtttcaaacagctagaaggagcatactacatattaaatgttccccaaacaactaatgataaatatttgagatgatggatatgctaatcaccctgatctgatcaatatatattatatgtatcaaaacatcactatgtaccctgtaaaaatgtacaattatttttcagttaaaaaaggaaaagaaacaaaaaaataaatattctgagaagatgaccttaagagagatgttggaagagagggagggttgggaaaatgggagatgtctgagaaataccctagaggaaatttgaaatagaaaaacagagctgaggaaagaaataaagatgaatcaaaaattaaattggagttatatgatggttcagggagcaacacatgtgtagagaaggaaatgagaggctggaactttggggaatcccagagttaagtaatagacaggggaagaggcagggaggggaggttgctcatgaaagttcatacatgtgggaaaaccatggacagccatgtcactgaagatgggagtggctgctgaagcctaatggtgatgaagaagactagaaaatgttccttatgcttggcgatttgcagattattagtaaccagatagaacagcagagaaaataactagctgccaaaaggttggtggggagggcttggagggcagaggaacctgggctcagcagcagtcaagggggattctgtgaagtctggggggagaagcaccctggtgggacactctaaaatgtcaaggtgaatggagaaagcaagggaaagaggcagggttatgaggagggcttctgtgagtggagtgaaatttaaggtgcctaaagaaagctaacaggaaaagtctgaaggttgagaaaagaagcaagatcactgttaaaaaaaaaaaatatatatatatatatatatatatatatatatatatatatatatatatatatatatatctcaaagaatctagaaaaaggataggaagtggagtcagaggagagtttagtcttggacaaggtggcagggtccttactctaataacagaagcaaaactgtggattaagcttataaggaagggatttcatttatttactcaacaagcatctgagtgtgtagatgcagacatgggcattttagacctggttttcaaggtgcctccaatctggttggggatatggataactgaagaattagtttgcaacagcatgagataaaccatgagggatgctgactggggtgttgaagggtgagaggatggcaggtggtgagagagacattccagagtttccttgtgagttacaggtttggttaggagggaagtggagctaactgttgaagaatagagattggccaaatctctggaatttcagaagcatcaactttgggaaacggaatttgctaatggagtggagtctgatgcagttcttcacttattttcttctggtatgcagaccaaaattatctgagaatgatcttttcacttctggctacaaaaatgcaagccaccagtagaaccacaggcaccagtttacagtgtagagagcactggactgggagtcagatctgggttgtacttatgtggtcatgggaaattccttcccctaggtgcagggactcaggattcgctttagtaaaatgaagggttattctttattgttctcagaaaggtggtttgagaatcacctgtgtggtgggctaagtattgtttcctaaaaatttgatgtctacccggaacctcagcattgtgacctgatttgtaaatagtgtctttgcacatgcaattagttaagatgaggtcacactggattatggtgctccctgattcctatgatggtgtcctcatcagaagagggtacacagagatgaagcccatgtgaagacaaacagagagtgaagtgatgcttctgtaagccaaggaatatcaaggattgcaggaaacccccagaaactaggaagggacaaaaatgattctcccctggagcctttatgacctgctcacaacttgattttagacttctcaccagaactgaaagataacatattttcgttgaaagctactaagtttgtgataatttgctacagcatccctaggaaagtaataccacctgcatccggaatatcaggaatcttattaaaatgccacttcatagtatccatcccagatcttctgaatcagaaatactgagactagagccctgagatttaaactattaacattatttatgtttcttatgaagttttaaatgtgagaaccactggcctaaatgatgccttaacagctctgaacaatctgaaagttaaaatgacaggactattttatgcatatagacgacatctcccccggtgaagtgtgttacttcccatcctataggtatcacaaacagaagtatttattttattaaatacaaaaagaaccagatcgcttccaaactacatgcttctaaacactttcataggttttgtgttctggcagcattttaaagataaaactattaagggttttattttttctggagaggtatttgtctctgagcagtttgatgaatatttaaatttcttttaatctgtgttctcccatcattttctgtatatgtttctttcttatctcattttatctggccttattttttttctctgcttttattcattttctgtgtactcagaaattaaaggcatatccattgtatgtttttatttaatagttttttactctttatcctgtacggcctgtggaaaatatttcactatgaggattagtcattgcatctctgaaccatccctgatgcatctcttggctaatggaggctgtatagtgtagtagttaaggacaaaatggaacgaggctacccaggtttagttccagcaattaggttatgcaacattgggcaattgactgaacttctttctgtgtcagttttctcaagggtaaaatgtggttgttaatgggacccatgtgttagtccgctctgctcagttatgctgcagtaacagatgcctccctggaatcctagtgacttaaatgagcagagctttatttcccaccggcattaatattcatcctagttctgctgcagtgcttcttcatgcctcttcatttctggaccctgcctgaagaggcagctctgatttgtcgcatcctggatttgtggccaagggaagagagctagcagagccatgtggtggccctcagaccttctaagtggttcacactatttctgctcacattttcttggctgtgaagcacataaggcaaaatgcctgacataagaggcagaaaatgtaaccctccagaaagggtggacctattcggaagaggctggtaggaaaagacagcaaatattgtcaaaaataatgtaatcaaccacagcaactttatgggattgacgtgagtattaagtaagttaacataggtaaagcacttagaatagtgtcttatgactattgtctggtggtctattattaacggggtcttgtgcaagtatgtgaagacattaattctttatttgagaatccaatgtaccttccaaggaaagtgctatttagagttgagaaagatacagaaatacaggtcttggtctatgccttatggaatctgtatactcctccatgaagaatgtgaagaggaacagacagttgatgacttccagatggcctgagtgcccaccagcagggtatctagtggacacctctgtacctgttcttccacatgattggtgtttatttgttcaactcccccagcagactctaagctcctttagaacagtgagtgtatctttttcatcttcgcaccccagaaactttcacaacacctgtctagtaggtcatcaacttttaaattaaacccctccttctttatacagtctgaaagtggggtggtaatttcactctcttaggtaagaacagttttcttctgcttgatgccccatgttaatgaggaactcagggtgcatggaggaggcagtcagcagtttgaagtttacatccatactgtgcccaaactgttgcacagaagtatgaagacagcgcatggaaattagtcctgtttgccaacatagtcggttttgcatgcgtcatacatggccaggcttgctgtattaagagccagctgcatttaagtcttacttaaggggaaacaaatacatttgaattgaaatacacttgatttatttttgttgatgttctagttttaattattttctctatgtgcatgtcttgcaagttttatttttgtggggactataaggatatgatatttccagggagacgaagagctataatttctcaacttttcaaacctacatacatattattttaggaaggacaaatctcatcatcttagttaacaagaaccagaatagagtgatagttctgctaatctggcctcctgggtcttgcagttgcatacaccagatgctaagaggataagacagattagccaggagtaagaccattctgtgtggcagctacctctgtccacagtgggtgatcagctaatgccatcaagctcataagctgataggccttgtaattaccatgccaaagaggctgcaaatatccctcttttcccaattttaccttatatttagtactttctattgtaggaaggagatgctgcaaacaccatggaggttgatctgaaaataccgtattcccagaactctttgtcttgggatacttctaaaatccaatgactgtatcttcatatctatacataaagtcccccatccagatgggatattcatccagaatatggcagatagaacctgaagggtctttgggtatcaagagcatatcacttagcttcttacttgaatagacttacgctatttaagaatgatcgtaacctcattcttggcagtagagtgaattagacaaattaacaaattagagttcccaaaagtcctccatggttcagagtgaagagctatgtgattgtgcttagagacctgtgctacttcctcacaaccccaggagtctggtcagtttttggtaatttacaaccatggtccctcagcctgccctgagtgctgacagcagactactgccttctgtactctgtgggcttcatggactctaggtgggtatttaggttaatgggaagtgatctatctgtggagtcaggacaggcagctatctaggttaatgggaagcaatctatctgtggaatcagaaagactggattctttatttaatttcacaattcaatagcttgtgagcttgtgcaggtcacttaacctcttaatctcatcctaggtaattgacgttacctacctcatgcggttgctgtaacatttgagttactgcatgggacatgattgagtgctatgtaggttttatcttagtttgagttcccttgagagcaaagcctgagacaaagacttgggtgagatagtttttctggagtggtccccaaaagcagaagtgaaggagcagggagagtaagcagtgcagaaagaaacaccagtatgagtgtccactgtcaagattcctgctctaagcactgcataggtgggagagatgaaggtgttgccatgaatgcctcccaggattttctgcttaaaacataggaggttggagtatttattcattggctcccttcccctccccattctttgatatttacccctagggtattcttgccctcactcccatttcttggttgctctttcttgcaggcagggcaggcaccctagctttagagaaggcccaagggctggccatgcttgaagtgggggaccatcaaactgtctgagctcacaataactgtcacctgctgcagtggctgaaatctgacattggctgagggaatatgatgccaggcggcacgtgatgcagggtctgctggaagcgcatacaaatatgatatttttcatactcactttcatttacaatatacacatttaacttttttttttttttttttttttttgctttattaataggttctgtatgctaggcctgtaccctggtcttacaaatactttaaagaaagcccaggttatactcttcattatcctcctagaattagattttctgtttcataattagcaatagtctcccatatcctccatgccctttacccagcctcaccctagtcctctttcagtcctgagacaggacaactcagggatgtaaacatggagaaactgtgagaacaaaccagagaggaaggatttttcagacaggctgactagggtttgagtcccacagctgtatgaccttgacaggtcacagagctttgctctgtctcttgattcctaaagctggggtatagtagatcagctgcatgctacaaaactaaatgagaccacgtatgcaaagcaactggtacttctttatatatggtactttcattcccctatcacttccccaaaaagctgcattttttctggccaggaagaatatatattaaaaggaaaagtagtgacttcatttatatctatctgctgcctgatatctttcagctccaaatttgtcaaattcactctactgccaagttccttctgctcctcttccttctccccctctaccctccataaatttactctcctttaatttattcatccatttctatgtattcacttattaattcaattatatgtatttactactatatggaatgctttcctgaatcggttcaatctgtcctattgctaaaatacagtctgcagctctcttcagctccccctccatttcttctctccccctcaacccatccactcatttgtttatttaatttattcagttttatttatttgctcactagtttttttccaatacattgaacaccctcttggtgcaatgtgccatgcttagttgttggggattacaaaggtagaatattctacctcaaagggcatagaagtgaatttttttttttaaaaaaaaactacaatacaaggaatagagtggtcatttgcaaaataaaatttttattgaattgctgaagcagtaaactctcagctgggagggtcagggaaggctgaggagggatggctgcagatagaaaggttataaaagtaatagagggagacaaatgtaagctgtattttgcattccttgattcctatttaaagcaaaatattaattaatattaatgtactagacctttaaattcataattggatatatatttttttctgcatgctagggcaaaaaggtcaattcacaagaatacagacttaaattagaaatgtattaggggatggtaggcagcaggtcttatggcatatcctcgttagaatctctttagctcaatcacattcagcttcaaaatctgtgactttagtgataaacagtaagatcacacgatcagactcaaaagcactataatacctaaaaatcattgtaagaaatctaatttgtattaatcataccattagaaaagtggagaaagtttcagtatctgttataaagtttttttaaaaacaagagtagaatcaatatccacaaaaggatcttcctgcctatccctgagaaaattgcccttatctcttgaaaagtggtttcatggagagagattatcgcaagaaagcttgagcctgtccccagcttaccactgctgagcactgctgtaaatttatggcttgaggtagaggtttggcaatacattggggacaatattctttttcatcttctgaggagccatttgtttctttggaggtatatctgctccagattcattccatttcaaaattgagatgctccattctctcagccaagatgaatgggttcattttacactgtgatcacaatttagagatgctattgaatgggctgccagtgtttgctttgtaatgttaggggcactcttttttctagtcttaaggcataggttacagcacataacagaaaccatgcaggaaagacaaaaagaagaaagagagggagggaaggaaggaaggaagaaaaaagaaggaaagaaggaaggaaggaaaaaaggaaggaaggaagggaacgagggaggtgggtgggcaaatagcaacacccaacaatcctgtatcatcaatagatagttgtggcctgaggtataaattaacactattctaagaaaaatcaggcaagcagtgaactttgattcatacgtctcagcagcaggaagctgccgggagctggttatcaagtgtgactcataggagagacacaataccagaagtagccttctctggctagtaggatcaatcatgtcttacttttttctggaatctttcccttttcagtgaggctgttttcatctacccagtttgtcagagcaaaccctaggaatcaacactgatttctctctttacttctcctactaccaattcacctcccaaaccaatctccaagtcctgttgactccacctctaaaatacatcccaaattttacaactttcatttctactgtctcctagttttagcctaaatcattttcatctcttttctttaatagcttcctaatagatcttgtttccattatttcacttttggtctaatatacctacagcaaccagagtgattctcaaaatttaattgagattatataatctccttacttaaaaccttccaagagcttccagtatgtgttgaagagctttcaggtttgtaccatgtcattaggacttcatgtgatctggactctgcctacatcaccagctttgcatgattggctccttcctaaatgcaccttctcagagaagccttctctgatcatctcatttagtatctttctacccaaccaactgctcaggacaagagtagagaagtcacctcaaagaggccttcctggaacattctacaaagtagccagtcctcagtcctcactccctacccccaactgcttttcatcgtattaccctgccttattttagatagggttgacagaactcaaccctatctaaaattatctcatgttccttaatttgtgtattgtctatcagattttctcaccccaaagtagactgtaaaccatgtaaggcaggacccgttctgtcttgtttatctttttatcctccacaatgaggatcagaatgagcatcagaatgtgaccacagtgcctggttgccttctgatgctcaattagcatttgtgaaagatgtgaatagatagtcttgcaaaaccttggcagaagtgagtaacagtattctattaataccctgggaggctgaagtagaggatgaggcacggagaaagaggtgagtagtccatcgttgaacttgttatatgtggcagtctcaatggtatgtttgcttattaaatcctgataaatattggtggcatttttagtaggttttaactagaagcaggggctcctggagggtgctcaggctgaatagctgggtcacttgtctttctcacacctccctgggagacttctctgtagaagacttcaagaaaaatccctgcaccttccacacctgttgtaggaggtatggcagctattcctgagccttaagtactccagtaagaatgaaatgaactatttgaggtgttctgccaaacgggctctaaaaataattatgatttaaaatgttttttttttccagtgaatatgaacgctttaaaactaagtttgtaaaaacaaaacaaaacaaacaaaacacctcctcaatctctgttgggttagacacccaaagaaagcaaccagaagctgaaattttgtggacagaacataaaacgcctttttcctacttctctgtcctcctcttcttccttcagtcctgttctttttccttatcatccctgcttttacttgcctgatctgttttgtctggggaggatgcctaatacaatgtgtgatgctatgggcttagtgaaatgcttgtcacagctcagctagcctagccaaaggggctggtggaagcaaaggtaagttttcttttttgacatatctttggtttccttcaaatctaacacagtccatcattttgagcatttattaaccatatcatttagatgtataattataggcatctttcactacgcctttctaaagagggtaattttcatatattttatgcattgtagaaattttggttcatgtgaaacatagtttgaagggaaatcaagttactgtttcatttacctctttgaataaatagaaagatgttcaggtaaaaccaagtgattatgatacagatctcaccccctccctccccaacctccacccaagcaaaagtttccaatggttccccatacacttttggaaacagagctttgtggcatatggaaggaatttctaccccctgcgtatgagcaaacccatctggtttagttggtttggccaggtcttagaaatacattgacaaacacgtgtatgtcaggggtaacttgtagtcttgctgcttatattgctcctggggggaataagaaattcatgtaatatgaacagtctagtttttaagaaaactgaaataaattaaaaataattaaaatccaaagttcaccttatgaaggtgtgtgcctttaataatgctcaaatatagatttttaacatacactctgattttctgtctgccaaaagagggaaaaatctgataatagctgagtgtcatcttcctccaagcaatcagcaatgcattatttcctaatattgctgtttgatttcattattggttctggcttcttaaagaaataagggttccatagggttactgtaggataggtcaagaaaaacaatctagtcagtgtatttcatccatgatatcttattccgtattccccattcaacagagaattaggccatcttctgtgaagcaaagccttacctcaaagagatggtgctaaatgagttttcaatgaggatagcttgtgtgagcatttgggtggtattattacccaagggattcattaaaggctctctgttctacaatagtaaacaattaaacactctatttttacaaagttctgcatcccagaaatcttttgcatctttattccaggcatgagtgtcattacctgggaaattcaactgaggagtgttaggtaatttattaacattctctacttagatccagcagtgatagtttaagcagcctcaagagaatcaaaggatttttttttgtgatcaatatttattacttaaactataaaagagggaaaaatacatgtaatacatacaactaatatgtacccagttgcagatcataactttcctagttattaaaaatgcaggaaagttaatggttttgagacgtttcttaagttctcactagtttcattttaaatttcagtgttttcttctttttgtctgaaccatcctttacttacgtgaatcactctttacattcattgcttcactgatgctacttcactgggtttttgcttgaataggccagaaaaagtcatccctagactacatcatcaagaacagttttgtatatttcaaccttcagcttgtgtctgcatcttgcattacttatcaattcacttttatgcctgggctacttattaggtttgtttctcctctctctttgccttgatttcccgctgagtgtaaacatcacttttcctctgtagaatgagttgaccttttgacttgattaaggataaatgccattgactctccacttctggaggccaagggttttacaaaatcccactgggacttatttatttattgtttgaaaatgaatatcaaatactattccatatcattttaatgagatggatgtgaatctttttttttctactttaagaataataagaattgttactgttggaggtatcaaatgtaactaaatagtagggcatgagaagcttcagttttttgggggttttttgagatggagtctcgctctgtcatccaggctggagggcagtggcgcaatctcagctcactgcaacctctgcctccctggttcactccattctcctgcctcagtctcccgagtagctgggactacaggcgcctgccaccatgcccggctagtttttttgtatttttagtagagacggggtttcactgtgttagccaggatagtctcgatctcctgacctcgtgatctgcccgcctcggcctcccaaagttctgggattacaggcgtgagccactgcacctggcctggtttttttttttttttttttttttacatttttattcattggccatcacattccaaagttttacagtcaaatggacagttaaatatttgtgtttgaatctgaccactgtgaatatctcaaggataccataagagctgatggacctccaaacgttagcatcactggactgagagaaagctcgttttatatctctataggtactgtcataccaatgaagcaatgttcccaaactactatgtttgtgttagtcattttccgcttatcttgtccccaatcataaaaattaagcgatgtacaaaaattgcctaaagaacagatgccaccttatagaagatgttttaaatagcccgtacttgtagcagttctgccttcatagctaatattctccacgtctttcttcacttttttctttcttattgaagcatttgcatgtagaataaagaggataaaaacataaaaaaacaaagacagatttgttttttctgagaacatctgttcttgttataaagaatccacatgatgtggtccattttctttcaatgccctcactgttggctgttgtgatggcaactgttacatcaatcttagacctgaacttaataagataatgaagagtagtatctaatcagttgaaaatacagggaaattctgttgtaatacatacattttatgtaatattgagacaaacatacaaagcaagataagctgagatgtaatctaaaatggtttattgtagaattactttattcctaagattcattgctctcatggcatcactacctaattttgagtgcatttggtcctttaggtttccttactaaatgttcaagattcttgtaaatttgggttgcccttgagctttgggtgcattctgaaaattattaaatataagtcatttgctgtgtacattgtaattaaaagaaaatttttcactttgaaactctgtttatttttcaagaggagagttcctccaaacttgaactactaccatagctcttataaccagcagaaaataggaatactaattactcaaaattaaaaggtgtagtttgaaattacctagagatttatattcccctgtataaaatgtcttcagtcttggagaggagggaggagtgtagctagtgacagttacataataaagctttcaaaattacttagataaaatatattgactctaattgatggttaccatagaaacagacttatatagacattgattattcaagcactcattaaagctcctactatgtacttggccctgtgctcagtatatgttggagccaagtatatggttttccaaactatttcacatatatccatagggatatattagccacttatatgttatatcattttatttcctagtcattttcaggaatggggctttccacatatagattgactaatccaaaaatatttaatcagcgtctttcttcatgagctcagctatcctcctacaaagagcaaacttggtctgtcttctgcttctatgtaatcttctttgtcttttaaatttgcatttcagatcaataacgatatacatcctaaaagaatgtgatattttcttcctttattaactggatcattttaatgcctctttgtctctcttgccatctttttcccctaagtacaattcctgttacccctgattctttatagggttcacttgaaccttagcttgagcatctggagcatggatctcttgagacaacttggtttattcctctatttagtggcactttatattagtcatgcttttgtcctgaaaagtttcagttttggaactttacatcatttcagtttttaggtatttggatccttttggaggatgatgaacaatgggaaaattctgggggccctcacattcccttcaggagcattatttatgatggggtttaaaacttgacagtattactattgtaatgcttactattgtgatttctatggtcgtgaatcctagtaggaccctgtgttaatggaaatgtcaagttaaggcatatgtgttgcaaagttcttttctcgtcctattggtggatactctctaaaagccagactggtgtatcatgccaaatggccaaattattctatagaaaaaatactatggtaaatttcctatatcttaaaggaattcgtctggattctaaaactttgagagattaatgactgctaactacagcttcctgtaaatgattgcttactgccattggcatttgaaaaccttatatctaagataaaagaaggcactatttttttcattactgtaccattatcctttatgtttgaattgagacttttgcatttggggactcctacagagaatccactggatcagtaaaattcgaatggactttgggtggaatataattccttgaatgctgctgggtcatgtgcaccagtgtggttttgacaaccctgatgcatgagcactactttcagaattgattctaactttggcacttactaccatccttaggcaaaggaccagagaccttgtatgcagggcagaagctcaatgacaacgagtggcacaccgttcgggtggtgcggagaggaaaaagccttaagttaaccgtggatgatgatgtggctgagggtgagtatgactatggtgaaattcgtctgtcttttctctcagtcctctcagtcactgagtgagcaaacagtgttttgcaaaaccttttattttgcatagtagaagtcacaaatcatgttttctgttgacaaactcaggcaaggctaagaaggtcttcctctgtattttacaataccttttcatcaatgtgcgttatggaaattacctactaactataactacatatttatgggtctctctccttaggcgtagagtatgtgtctggagaacagatgtagggttctacagatccttttattattcaatcattcaaaaatcacatgtcaatcatcctcccatatgccagttccttccatcagtgagtgaatcactctctagtagaagagatgggcaaaccagaaattcagaacattacaggtaaaagtaagtactaaaacagtgcatgatacttagaaggtgctgaataaggtttggtttaattaattacttatttaatcattattaattatctattctgcactacacaccattttacaaggcactgataatacagtggtgaacaaacaagcaaatctttggcctggtgggatttacatttagaatgtggaaagaaacattcagagctccacacaatcaataagtatttcctaagagtctgttctatgtcagcagtatgctagaattgcagaagataaaatggaaacagatgagattacctgtttcctcaaataatgaaccaattaagcagatcagataggactctggtatttgaaaacaggaccaaaatatataatgagattctaattttgatgggtgagattacaatttgtcaatcagaagagagaattacccatttgggctggagaaatcaggagtggtttataaacgtagatcttcagactgaatttgatggtggatgtaatttatgaaggctgaggtacaagaaagagggtatcatcaagtgccattttacatgctatatcttttttttctttctttcttttttttttttttaagacagtcttgctctgtcgcccaggctggagtgcagtggcgcgatcttggctcactgcaagctctgcctcccgggttcacgccattctcctgcctcagcctcccgagtagctgggactacaggtgcctgccaccacgcctggctaattttttgtatttttagtagagatggcgtttcaccgtgttagccaggatggtctccatctcctgacctcctgatccacccgcctcggcctcccaaagtgctgggattacaggcgtgagccatcgcgccaggccttacatgctatatcttataagtcttccctctctgatattctagagcaggacacatctatgaagcagaattcttatccatatgggaaagaagatttggggcagcatggggtattacatgaaacactgttgccatcagatctgggccctgacgttaacttgcaggacgttaggaaagttaacattcctgggccttgtcaaatgcagtcagtggcctaagccatctccatggtttcttctgtgaataagacagtcagtagccctgggggtctaatataatcattgccactaaaatattttatgcctttgagatagatatactaaacctctttttcctaatttcctcatttttaaaattgatattctattatttctatggcctttccagcatgaatattctgtaatttggggtcttataatttaattttatattcatgagcctgagtttctatacttctggaatcaggaaatatagtaagatatgtacgtgcatgtacaggtgtgtgtgtgtagagaaggatagcctgtggattaaggaagagcgtctaggcacatatccagtgcccagtaggcattagaaactgttagctgtgttaagcatatcagctcctttaatcttctatcattcactatagcctttaaaggtaagtgttcttaatgccatttaaaggaagcataaaactttgagagcgttgtataattaagctccaaatccatgtcagtgtgattccacaaaatcattctgcttgctgtacttcaaaatccatcataagaaaataatttatcttacaatatgggaaaaatataatggaatgggttggagtgaggtagggaatgcattagcttattaaagtctcctaagaaacttacaggaggtaggccacaacacttgacctctccctcacaaaaacaaagacaaacagaaccaccacaacaattacccaaaacacttcgattacacatagacataactcagaagcgggaggtgaagttcctggtctacgtgcctggagcataaatttgcattctgaaatgaacattttaaaagagatgtacaaatggttacactatttagcgcccgcagccaacctgaattaattattcaagaactgtatgaactgttggtgcatctggatcctgcaaaggataagtcacacatctgttgctcactcctctgggcttgtctctgaagggtgatgggattcacagccgcttctgaaaagcagccactagatggcgacctcaccctgatctctcctgacagtgagttcgtttcattttccctggaaaataaatgctccaaaagtatagtcataaagaactacagagctgagggtactataatgtgtctctctcagtcattattcttttatgaaaactttggaataaagctatttgtaaattgcactttcttttaccactaataattaaaaagcagggccaagtcacgaaatgccattatccagtaatttgattttttgaaattaatgaaacgctttcattttcagacgtgtccccccaaccccccgaacttcactgctgatggaagaaagcagccagaaggataaagaaatttgagaggggaaaagtgctgttttgcttatgagttacaatcttgggttgctttttatagtgataaggggttgggaaattttaattttagttcacagaagtcataaaatcaggcaatgaaactaaaatacccacagtcctcaagttattaagtagtatctcattggcttatttagtaatccctttaatgttctttaaggcccccctagtgtgtccaatttcagctagtttatagaaatgatgtaaagaataggtctggctcacaagaaatcaaaagcaaggatagaaatattcctcaaccttgtgtttatcatttattgtaatgtgattgtgttcttggaaaagcattaagttcgggtgacagttaataataattgattgatctatgtttctattattaagaatacattactataccaagcataacttgagttatactcctcagaattggggcctaatgctgcatgaactgcctcctctgcctagaacttcttgctagtacaaaaacttgcccttgctagtagaaaaatttgactacactggttcttgttgacttttcctgtccttacctacatagcatgtatagcaccaagctgtaaaaagtcattttgcaaaattttccatttaaaatgtatttctcatagtaatttttaaaaacttgacaaaataggattgaggagtgtgcggtcaaacaaaatgaaatggagttctttattgccaggcttattaggagactttaataagctaatgtacattgcaaatcattgataagtatgcagtatttgctaattttttttttttttttttggttccagaaactttttttactgaagtattttataccacatacttacacacttttaaaaaatgctgacattatggagaaaaggatttgggaccagtagagctagggaattatgggcaaaatatgaagattcttgactggtactctgtaagccttcgttttcttaacttctctccccacgtctaagggccatgaaaggtcaatttgcttcctctcagcgtttcccattattattcttttttgctgagctcttagttttgaccaggaacctcatgtgtggaaatggtgaggacccaaaccttgaccccaaagcaaatgtctcaaatacaagcccctccccccagaagttaggaatgctggctgtgctcagacccctctggtagccactgggggacatatagaagacacaagaggtggcctctacttaaaaagagcccacattctcacacaaaaaaagagaaaaacagtaagtgaaatgaccacaacatgattcaatcatttcggaggaagggagagaaatgaatgcagcataattagtaatagcgcacggtttaagccataggcactctattaaaaactttacgtgtgttgatacgtttaaccctgctaacttcatatccgttttacagatggggatctgaggcatagaaaaattcagtaactcccccaaggtaacccagtgaagaagtcttggaagcagaatgcaaagtcaggcagtacagccctggactctccatgctcatccactatatgctattgcttcataggaataggaagctacagcttgaacctggccagaattttccataactatatgtccttcgtcactctaagagctggtttgtagactgcttgttggccatcagtgcaatatggaagtgaatgtgtgacaaggaggcaaggcaacaatgctgctttagggagggtgctggatatattacccatgaattagatggagtgacattctgatactgggccatagggaagaagtacaaactccttagaacagcttctacatggaaatttcaccagttaaattctacctactgcttttcttgggcaatgatgtgaggaataagtaaaaccttttttccaaagacagttcattgtactagtaaagatatgggctttggaattagcacacctgagttcaatgtaggggtctaccatttaccacctgcatgaatcttgatcaaactgcttaacctctgcaagctaaatgtcctaacctctaaagcaagagaaagatacttctctacaattttattgtgataatgacatttcatagtgattatgcagtatttagcacagtgcttgccttatatggaattttcagtagtcttggttttggcttgttatctttctccccagttacttctctttcccctgaagtttgaaagaagcggctgtgaggtatgaatatatttgccccttaagtagaaaggaggttcagtttgcagacagcattcagaggagatgagtgaaaggtttccatcactactattgattaaatgacacatagattaaaaaaaaaatatttggttggtttggcacaggtttcaaactttcagcatctctcatgctttgcacaggtgcaataatatacttattttttgaagtcttcatcaacaaaggagtaaattcgtttagcacacagtgaagccaattctttttctttcctttttctttctttctttttttttgagacggactcttgctttgtcacccaggctggagtgcggtggcatgatgtcgactcactgcagcctctgcctcctgggttcaagcagttcttctgcctcagcctcccaagtagctgggactacaggcgtgtgccaccacgccaggctaatttttgtatttttagtaaagacgggttttcaccatgttagccaggatggtctcgatctcctgacctcgtgatccacccacctcgacctcccaagccaattccttttctaatttgatctcacatggccttctccccctcccctcaccaacttttagttgaggctcctgtgtgagtcatcctgaactcccagtttgtgttcctgggctaagctcctaaatccactattaacttcacttcttgtacttatccacatccacgctcagtctctctgctatctcaataaacacttttttttttgctatgaaaaattaattttctagtgagcagaatatcccaacccctcaatcctggagatcaattcatccagaatttctctgaaagttctcaacttgactttaaaattgtttcttcagattccttttggaacctcaatcttcaccagagattccccattctgacttcttagttctcatcttagattttttctttgtaaaataagaattagcatgactagcagcatcatcatagttcagtttctctgtttctgtggatattgactatgactccccctccccatcattttccagcccagctccccttcctggtaggagtagctatagccaatttgacagtagatgtttctttcagtcactttattaatttagagcatgcaaatttagattatgttgctttgtattttcacagcctgtctgatttttaacactaagcaattttatttcctagttatttgttagcagatttatgttgcattttgatttttatatttaagttaaccaacatctttttttcttatactaagagagtgatttgtcactagttgtcaaaacactgcatagaagctcataacatgtaaatctaatttttgtgcttatagggaatataagaaattttatttttatttttttagagacagcatctcgctgtgttacctaggctggagtgcagcctcaaactcctgggctccagtgatcctcctaccttagcctcctgaatagttagcactataggtacatacctctatgcctggctaatattttttttttaatttgtagagactgggtcttgctatattgcccaggctggtcttgaactcctagcctcaagtaatctttctgtctcggcctcccaaagtgctgggattacaggcatgagccactgtctccagccaattctttaaattaggtctgagttttttcccaaagagataaaaccaatattgagcacttaagggtatgatctggtttagtctcccagatactgaagtttaagagacctaagaaaatacaatcctccctttttttgtcactgtaattctgagccaatagagaaaatattgcaatgaggatggaaggcaaatatcattttaattagtaataacacacaataatattgcttacacccactgaacttcagaattagacagaactgcccacttgaatagtagttcagaactgggcagacatcctttgtggaagcaaggcttgctcctgtaacacccattctatggatgcatgcagtagaatggacatttctgaaggcagcttgctccagcaaagagaaacaggaggtgttaggggctgagctaagcatacacagcttctctttgcagatcatccttaatatttctgattatgtcacttcttcaggaaagttgttaaagaggaaataaagagatgctatcagtcttgctaatggagttttttcaatgtagaaggtaacaagagaggacaggaagaaagaattccccctctaatgcttggcagtagaacatggtttgttatgttttaacatgatttttctatataaatgttgaggaagccaatttctactctggccacattaatgatgtttttctttattttgttattaaaatttccagtctctttgtatttttttttcaagccctccttatcccctctgccctagtcactcaccacttctaggtaaaataggtaatacaagttctaaatagttcatttgtaacagctgaagatatttccgttgtgaatgtcagaaacccaactcaaacgctttaagcatgaaagggagtctattgccacacagtttgaaaaagccgggaggtgcctggcttgatccagagtctcaaaggacagcacagatgattctcttcatttggtaattgtcttctgggttgctagtcctctgatccctctgattttcttatagcctctagggactcaaagctttcttcttacccctccagcagtccttgcttgcaaagaatcctctttcctaagtgtaccagcaagagctctggaactgagtgtggccgggatggcttgggttgttgccagttctaagggtggtccctaaatcagccacaagagcatcactgtgaaacttgttagaaatgcagattctcaggcctcaccccagacttttgaattctaaactctgagggcctaagccccccaggtgattctgatacaccctaaagtgtaatgaccgctttttaagtctgtagtccaaagtctgtgacagttaggggggtaaagtacattgagtggtctaggctgagtagcttgattagggtcaactttatccagtccaggtggttgaaaggtcaagaggggtgggtagcttcctaaagaaaaattacgtgttattataagataaagtaacagttgctgggcaggtaaactcaactgataagtctataatagaatccttcccacgagtactaagtggagagttattacgagaaaaaatacttggtagtgatgcccaagacttgtgtgttgtgtctttacaagggtcagagcaacaaaggcctttcttcttatagtgtgtattagtgtccagtgattctcctgaatggagaatatcaatagttttatcctttagcctgggttactcatgacctcatatttccccttatatgatgagccgtgctgagcagctgcgtgacagcatgtaatttgggcaatgcctgattgaggccaagtaaggtatctaccatattgaatatttggttttcttgaactcacccaagaaagctgaatattctgtgtggaaacaggttacacccaaaaaatatacttgagggtgctgtgataaatgatggtaacttttctgtttgtacctcatttacaattttcacaggtacaatggtgggagaccatacccgtttggagttccacaacattgaaacgggaatcatgactgagaaacgctacatctccgttgtcccctccagctttattggccatctgcagagcctcatgtttaatggccttctctacattgacttgtgcaaaaatggtgacattgattattgtgagctgaaggctcgttttggactgaggaacatcatcgctgaccctgtcacctttaagaccaagagcagctacctgagccttgccactcttcaggcttacacctccatgcacctcttcttccagttcaagaccacctcaccagatggcttcattctcttcaatagtggtgatggcaatgacttcattgcagtcgagcttgtcaaggggtaagtagaagggatcacgacttatgttggacacctttaatctactgaagctctacgtaaaatatggacataaaaataacttgtctattctactccctaccctccattcctgacacattctcgcatcttccttgattaaatggatccataaaattattaggtctggaaaggagagaggctcatgatttaatttaaaggtcttccactaactcaacactaacagactttttcctatgaaatgtagccctttaaaactattgaagaaaagcttatttttgcaaaagagggctatgatttgtattgcatctaattcttgagtattactaactacaaccacccaatttataccaaaagatgaaacataaatattttaaatcctaccattagcccatatatgcaagtttttagaagctgccctttcctcaagacattttactaccatgtattagaaaatagtcaaaacaaaaaaccaaaacaaaaaccaaaacagattaatggttgatgatgaatttaaaagtcacccccttatgttttgtagtgtacaacctgtgctactttgactctggagagtattagtaggtagtgttaatgaagtggactcgatgagtatggaattatagtgaagcatgatagaataaaatctgactattcttgtaacctcatatcaagatttaaattattcctgcattatgccagtttagcatgggggatttgaagcccactatgtcagttacacacatatagccattaaaccacttcggggattttccaattattgtttttttttttttttcttcctaggtatatacactacgtttttgacctcggaaacggtcccaatgtgatcaaaggcaacagtgaccgccccctgaatgacaaccagtggcacaatgtcgtcatcactcgggacaatagtaacactcatagcctgaaagtggacaccaaagtggtcactcaggttatcaatggtgccaaaaatctggatttgaaaggtaaaccttgtaaagaaatttagtttttaatagagcttttcttacaatagatagactatttccagaggcaaaccacaggttcagagtgccatgcatttttgatacatcatccatatcctgttttaacaatgttgaattatcctgtaatgcaattttttccgtttttacttagactactcatcaagaaatggttcattttctctgataacctcgggaatgtcatgctgtgggggctgagagatgacaggatgagtgtcaaagtgtgggaagggccgtaatacagaggaaggaatataggctttggaatttcagctgaatcatttaatgtctggtgtcatcagtaaactgtcttagccttgttcagcttacatttacttttctttgcaaaatgaggataataattgttagtttctgtataggtcgtgagaagttttgatggcatgtctgtatatccctcagcatattattggtaacaagcacataaaaagcactcaataaatgcttgctttgttgacaatattgttaatctttactccatctatgatgaataaatttttgagatggtatatataaaatgaatgacacataataaatattggtttcctttttttgcagggtagaaactcaggtgcttatctcatttatgctgtcccccccccccccccccagctatcttattccttatctgatgaattatctcaagtgtatcaaactagttgacatggtcaccacatcctttactcattctcttttgctaattactttcctttccaggtgatctctatatggctggtctggcccaaggcatgtacagcaacctcccaaagctcgtggcctctcgagatggctttcagggctgtctagcatcagtggacttgaatggacgcctgccagacctcatcaatgatgctcttcatcggagcggacagatcgagcgtggctgtgaaggtacaacctatttttttcttgttaagctacagccttgttgcaagcaccaagcctctttgctgcctctgccactgcctccttcctcagttgaccagtcctgtctcattctcatttgccacgtgacattgcatcaccatcagtgttctcttgtcactggtttagtatgtcaagacatgtgccacaggctccaggaatgtatgttggcagatgttttctgagtatcacatacttgccaataaaaataaaataaaataaaaaacttccctggcattgacatcaggcttctttcaatgtgtaccttggcttccagaatggctgaaacagcactggagacttttatttatactttaatacatgatgaggggaaaaccagagattttatgtagatgtcactaattaataaaatgtttcttattttggctgatagtgactgcattatttaatgcaaatctagcaggcaataggaaaacgatgtccaaatgccatgatgatggaagggaactaacatttactaagtacttactaattatcaggcattgctaggcagttctttagtgtggtatattggaacattatgggctttgatattagaaatacctggattcagctccaggtagtagctcttgttagctatgtgacatttggaaggtgatgtaacttctgtaagctatatctttcttacctataaaacagggcaataaaacttaccttgaatgtaaggagatcagaaatacacataaaatgcctggtatgtagtaggtactcgataaatggtaggcttattgtttacaaatattattttatgtcaaacatctaataatactgcatgtctacccatgcagcacaacaaaccatgctcagcctgttcctgtagatgatccactgtctcttgagatactaaatgaattttacaggtcttcctgaatccaacaattctttgcagtgtaaacaatctagttttaaccagcagatggcagaagtgaacacattcagccttccctagtagtcttgggttggctgaaaacgtgactgttacctaacttgaaaggcaaagaagttgcctgaccaaggatctatgtaattatttcctttttttctttttgagccttttggttgagccttatggtcctgtgtttgcgcaatatattgtgtttccttgtatcagttgttaatttaccacatcaaatctgttcattccacttctgtgttcaacttcatgtatcgcttctgttcttaaacagcttccatctgggttagctcatcatcgtaaagcacacatttataaaagcttcctgtcagcttatcaggctgacttggagttatggaaattgtttccctttgcctaagagttatttttgtattttgcactagtaataggaatgttcattcctataacccactccatttttcctttatccagaaatatttcttaaattgtcttggccaaatatggtgtttgtactatgtagtgtgtgtgtgtgtgtgtgtgtgtgtgtgtgtgtgtgtgtgtataaagggacaggaggttgggaatcactaagcccttaaagcagccactttgctcctagaaatgaacaatttcattcaatcagggatttttgtctccttggcttgcttttagttcttttgtgtattaaagggcaatcctggaatagacgtagcatttggaattaaattgtatatagtgtttagaagattgtagaatggcagtaattccatttatcctggaataattaatcatatgaagtcaaatcacaatataagagcacatattagaaagcgtaagatactggtcaaatgttacagaatttttattatgccatcagttcttcagatttaaaagttaacaggaatcatccattaactctatgtcagtgttttccaatagatatatgtaacacatgcaattataaatttcctagtagctacattttaaaaaggtataaagtaacaggtcaaatttattttaattttgtattttattcaatttaactaaatatacccaaaatattatttcagaatgtaatagagataaaattatcaatattttgcactttttttcacattaagcctctaaacttgagtttgtattttatacttgcagcacacctcaacccaggggctacatgcatttaaagtgctcaatacacatgtcaatggctactgtattggtagtacaggtatacagaatacaaaaattaaggtgtaaataaataaagctatagtattggattaaaaggaggtctaagctttataaaagggtactaaaatgtataatataaagggagaatgacctcacttaagagagttttaagagaagcagtaagagcatcagcaaaaagaaattacataacgagttggggaaaatgtccctatccctatctacagctctatgtgcagtttggcattactcatcacatgcattacagagagctccgaccttcctctgagtatggttgattgttcaaagccggatattgtggcttgatggctccaccatctgaatctatggtgagtcccatgagcctaatagcactgcactctattgccatggagataattacaacggttacccactgagcattatgcctaccccgctgggtgggatgaagtggagggtgagtgctgagggaagaaagtccttgttgattgtacacaaatgacttggataattagcctaagtggccaggaaaaatggcccaaaatgggttaaggcataaattactgtcattggaagtttgtaccactgtgaataagcccttgcaagagatcccaggagcattttagggttctgtgtaagatggtggggaggtaaagggagagcaaaaaacactggagacactgcaaaaaggcatcatttttattctgaatctcttgtgtagagcatgagacccccaagaaggcctttgagcattaggtagtatgaggaccacaggaaacagaacaaatttcttaatttatcatttcttttacatagaacagtaaacaagtaggggatgaggttttataactaagaactaagaccagaatctcttcaagatatgttttattctagcaaatctagaatacacagataaacatatatatatatatatacacacacacacacagatagataagtatctgtatctatctacatttaatatatgtttccatcaaagtcattgacaatgacactttaagatccctaggtagtaaatgtgttaccttccctattatatcagacccatgacagcaggtaaaataaaaggcaaaagagtccaaaattatttttatttattttattgattgagtgagtgagtgagtgagacggagtttcgctcttgttgcccaggctggagtgcagtggcgtgatctcggctcactgcaacctccacctcccagcttcaagcgaatctgctgcctcagcctcccaagtagctgggattacaggtgcccaccaccatacctggctaatttttgtgtttttagtagagatggggttttaccatgttggccaggctggtctcgacctcttgatctcaggtgatccacccacctcggcctcccaaagtggtagcaaaattatttaaaaacttgctaatttagtactcttcagctctcaagtatgagtagcaaaaaagaaaaaaatcttgaaactagtatttgattttatgtctctgatagatgcaaagtgtataatttagatattaagtgcaatttctgggcaactcctagtcaacatttagttgtaacttgatacctctcaatttaagctagggttttaaaaaaaatcatacctgatttaatatgtggctggtaaatgtatcttcctatattgaggccagctttgctgcagaggccaaggcatgatcagctagaaatgtggtttcacaattgcagatgataaacatctgaaagaaatacacgtgctttgttttgaaactggcacgaataaataaaaatgacattagtctggtgcccttttgcctgcaactatttgggtttggatatatttttaaaattaaacaaattgagctttttggtgttcccaaatcaccgtgatccaaatgtctaattccagtgccaaattcctgggtggcatttgcaagagggcacaaggggtgcactcgagtgactctttcatgctgaactcctaatgtttagaagtatttctatgggctccatctgattgcacacacgtgtctttcagtctgaccgtgcactccctgaggttggctgtgtggatgtgagaaagctcttgttgcccttgttgcccgttgcctgtgctttgtcaagtctgatgcgcccctgccctgctctgctgacttggctctgaggaggccggctctgtccctggtctgcgcgtccccctctgccctactccccaaccccatctttgctgtctctggtgaacctgtagagcatttcaattgtctgtctgagtgatggttatgcagattgcgttttcatttctgtaatgttatcctggtttattctacctcttactaacctctggttattgttttcgctttttctgttcttttgctaacaaagttgcgttgaccaaagctgacctgcaaggtagagaaggttcttgttcccattaccactttggactgaaagatgccctgtgtaacccttggtatcttttctttagagatcttcaagctgtcacacctcttggacagcagcaattgtggggaggtggctgaaccctgtgttcttctgaaagggtgacagataacccagatcaatgcatgaaaaatagctatcaagaggagacctcatgggggaagaaacatgattccattttggggggtaccaaagaggtttgacagcatcccataccgtgactatacataaacatattaatttactctggaaatgataaatacctctccaagtagttgccatggaggggttggctcctcttaatttattcaccatacatagaaaaaagaacttggaaggaaaaaaaaggccaaggccagcccttatgccttaagttattattttctggatcagggaggtcatttcctggagcaggacatttaagtacttgggctttatgaaagagaatgtcattttctcttaactagttttaaagttttaaatatttctgggcatttgggagacactaatgtcattaaaatgtttcagagatttatattttctattggggattttggttgagcactttaatttcctgttttgtgatcgcaggaaaaaagtactcttgaggaagaagatgatctgtcattttaatcctgaataccctataaaataccacatgtgagatgttagtgaatatctattgcagaaactacttcatccactattcaaagaggcatcttacaaagtcagtaatggcccactgatcctatggtgccatgctgctatgtctcagaataacaagggaggaacaagcattttaggtgtcttttggctgattgtcaagcaggagactgagcctcatgacctctgctgagtttgcagtcagtccaaattgttagaagtagttaaggcaaaggtaacgttcaaaaaattacttttcatctaaaaagatcattgactttgctgtgactttcttgttatatgccatgtagctaaccagtacaagcgcctatctatccagaatacatccaccaatgaagactctgtcactattttaccataactttgtttttctttatcgcctcttagcagattcacatatattttaatatatatttaaattaaataaaagaatatacactagttaggacttaaagtcagaggaagctttacaatagctttcagtttcaaagtatagagggcccttgtggcaatactgttgttttagacattatgtttaattgtcaagaaagatccactatgtatttctctgtaaatggaagagagagagaagggggcaggactcaatctgaatgcaagacaatccaaggagattgaagctccttaggactggatttagcggattaaactagacaactacatctcttccctgactttactatcacgcagggtaagaactatatggattttgaattcccagagcttagcatattctctcacctagaaaatctggacatggcaaaataatctgaaagttctcatccaaaggaataatggtttgtagggagaagtgagtcattgatttctatgcctaaagtaaattgtttaccaaagcgtagatacagatttagggacatagtggtttggaatatattgatgtttccttttatggaagctgtctaggcatcaatatggttttaacattattactttattggcacgaactttcctccattcttgtaatgacttgacagtctctttgtttgtggcaggagctgctttttttttcgattatttggggccgtcttactctttccctgttttataggaaaagcttttagttttttgtttcctaacattggggtgtggactattactcacaagctggctttttcagctacaacctgtgagtatagatagtactaattaccatgaagtatgaagggtagtgaagatatatgacaaggaaatgaggcagttggaagcctagacaaaaatgtattcagaaggaaatataacaatgaggtgtaagaagtgacgtaatgagtctagatgagtcaacagcttaagtcctcttgttattgtgtggttggggtagtgttttattttttatttaaaaatttttaacttctccagtgaatgtgttgttgaatttaacaggaagttagtgtcagctatgcctgtgtatcagggactaggtactggggatgctaggatactgcagatgagatgcagtctctaacttcaaagaattccacagatgatcagccaataattacaatgcaaagtgaaaactcctatcctagagacatgcgtcctgccatgtgagcatgaaggaacacactggatcgtgtagggtcatggtggtcatggggagtgctcaggggatatcttctcagacagagtttgagctgagtctgaaggacaagtatgttttagatggatgaacgatggaagcacattcgagagcttggcttaattgggaatctacaagaagctcaatgtggctgaaataatgtgtgtggggggatatgatagcacatgaaatgggagtggtaggatagagacaggtaatgacagacttttcctgtaaggagttggactttatcccaaggatgctgtgaggaggacagagatttgggttggattttcattttatcaggatcactctgacactagaatggagaaaggatgatgcagacagaaactagaaacagagagcagattcaggagtgaagcagcatattccaagacagagggaagagacatgcccccagtgcctgttacttgacttggtcaaggaggtaaacaagtttccctttcacatgaaacctcaaagagcaagaaagaaagtgaactctttctcctgtttgctgcacacaccctctccactgctacactgttattctggttagtagcacatgtattttcacattatgacaaaagatatcaagaaagaagtttaccgactttcctggtttcaggccagaatctacatctctctaggtcaacacaggagacaggagctctccacggtactcctgtgatccacgggagggaggttgccttgctgagcagtgcagtctttgtatcagtgtaccttggacagaatgacagcttctacagaacattcagaagtaactttctaattcctttttgtttttaagaagggtattagtggaaaggaagagatttcctaaaagcctattcatggaagaaaggagctgcagaactataaaagaaatattaagattgacctgtttggtgtgaggcagatgacataaattatgagaaataaaagaataactcttttttgtattaggtgattaattagaatcttcctattccatctttaattataacttctcttagcaggttttatttctgatgtttaatgactttttttctagaaatgtaaggtgtccctctgcccagatggtgaacacgtggtcaggggatccaggatccattggatctgggtgctaagtgctggctattttgagaaagtcaatcaatgtattgggttcagatgccttggaaatctcaagattctttaaaggcattttagaacagagttagaattagtcaaacacctttagttaggtaaaggaaattttaattccccaactgtctttactatgatgaatattgtcctccacctcattttctccgaaactgaagattgtatcacattctccattgtattttttgttataaaatatagtacttgacctactataagttcctcaaaatgctttctattgtggaaaataataagagagacataaattgcagtgaacttcccattattgttcttgtgtccttttcctccacattatacgagagaggcgtacaacacaactgtgtcagtgtggcacactaccaaaatgcatcttgtttctggactcctcatcaactgtacacccaacttaagtgggaggaggaaacctgattattgtcctttctagcagaattgctgatgatctttattgagagtctccttgatgaaggcatacactaaggacttggcaggttgtatctccattgtgactacaaccttagctgatagatactgttgtctgtttcataggtgactttataggtcttgcatatgttctttcatttaatcttcacaccatatgatgcagtagaaatacatatctcccttatacagatggggacactgaggtttagagtttaatatcaccagcccaaggtcacattactagtaagtgattaaactggattttaaagcccatgacctttcgcctattatgccgtatggtgtgagtctgggtttgcttatttccaaagcagaaagagtacatagatgaccagagagtatctgagagtgtcctccatgctgactttatggtagatggttttcatatcaacaccatttcgaaaagttctagataatatttgcacaatgttagagcaaagtattttaaattacctctttttttgttgttgttgagactgggctttgaaactccttctctctctcttttaaagtatattccactgccccagcagacccctacatcagtgcctagaaaacaaggaaaagcagacagactcctcagtttacattttctaaagaatcattgacttatgagggattgtgtatcactttgaaaagagttatttgacctttgtgacccaggcatcccatgaaaatagggtgggttgaggaagaaggcttcatgctaccagccatcctctcactcttacaaataccctacctgcagcaagtatcaactcccacctctctactgtcatggaaggtgctgtgggtaaatcactttactcttaagctgtaattattctttttagatcattgaccatcaagagcagtgctgtgctagagctggcactggcacaggaatttctaggaattttgtaagccagtttacatgaggcaacatgttatggcttgaaattggctatgaggggagtactaataaaaccaacacatgttacaaatcagttttattttccttttcctggggtgctggttgttaaacatttactagtgatatatcaccaataaaaggccactggggataaagataccatgaagccatctcagtcaaccaattcccatccatggccataaccaattttatacccaacgtattatgagagggttgaagtggttgaagagaaaagggtgttagtgaaactgctccaaatgttagattttattctttgtctttttcactgatcactctaatcatgtgacctttttaaaacctctgtttgagaagaggaagccataagcatctgaacatgcttgagaagagtggttttgatgccttgcttagctttggtaaggcataggtcctgacttcaagacaaaaagcatgatcttgggaatacagccacccttaggtctctctgacaatgagattttataataagatttaggaccctattctctggcattgccttatgttctataaaatgtgacctagagtattcgcgtctcagtggattcacttgacatttttaagtgatcattgctttcttattttaaagctaaatataagtgaatttggcttcctccagttaaaatgaatagatcttatgttgtctgtaaatgactctcttcagaaaagccaaggggactcaacactgtaaatttagaaatactctgaaagctatggaagtagctttgctgaagggtccaagacatatattcagctaagtaaataggctatccttattatcaggaataccctctgtattagttagggttctccagagaggtatcatatatatcatatataggatatatgcatcttatatataatatataaaatatatattatttagatatatacatcttatatataatatattatataaaatatatattatttatatacatatgtataaaaataggaattggctcacatgattatggaggccaagaaactccacagtccgctgtctgtatgctggagaataaaacagttggattctaaagccctgggaatgggggtggcaggggcagaagtggcatgatagtgtaagttctgctctgattcgaaaagcccaagaaccaggagcacaagtgtccaatgtctgagggctagagaatatggctatctcacctcaagcaaagaaagcgaattcctccttcctctgcctttttcttctattcagaataggaccacaacagattggatgatgcctactcacactggggaccatctgctttattctcttcaccagttaaaatgctaatctcatttgtaaataccctcaaagacatacctggaaataatatttcattattattatatataatgaccaggtatctgggcatcccttacctcagtcattttgacacataaaattaaccatcacattctcctgaagactctcaactctttaatttttatattttagcagtcgagactatagattgctcaggtaggcagtaagagtctttcataatccatttgcattttcaaaaatttccctgtagggtttctatagacttatttatatgagacttatataaatacacacacatatacataaatctatgtatattcatcttttttctgtacttttttccttccacccaactactgttcactcatttttttcctataaaacaatgtaaattttaaaatgtgaaagtagaaagattaggcacttaccaggggtagaaaattaaactaaagttggaagatctctttagacagttcatggcatgtattattctgttctcatgctgctaataaaaatatacccaagactgagtaatttataaagaaaaagagacttaatgtactcatagttccatgtggctgggcaggcctcacaatcatggcagaaggcaaacgaggagcaaagtcacgtcttacatggaggcaggcaagagagaacttgtgtaggggaactcccctttataaacccatcagatctcatgagacttattcactatcgtgagaacagcatgggaaagacctacccccatgattcaattacctcccaccgggcccctcccacaacatgtgggaattaagggagctacaattcaagatgagatttgggtggggacacagccaacaatatcagcaactcttataatgctccttcccatggaagctgtggtttgttgggacaggcaaaccctttggttaacacggaattctactatgataacttcacatttaggttacaccgatagagtctaagccctttgacttaagcccttcactccttgtgattaaagttagtgaatgttgatagatcagcctcacctggtccccactcctgggtcaccagccttggccctctaaaggaatggacattgagaagacaaacttgatatggcctccaggcctgtcacttctccttttctcccttaccctctgcctgctgcaccctacatttctccacccacttcttgtctggctagaaccaggtggtgctgctttagcactatttatgaatttcaaattggggtgtttgagacataggtttggttaagtcttatttgggcaataacagagggaaagtgcattctgatactagtgttgtgagctttaggaagaaagtctatttcaaggacctacaaacaataaaaaatactctatcaactttggttttctaggccatgaagaggaattgactaaatcagtgtacacgtgctgtaagggtggattagagcagtaacaggcataaaatggttgtatcagacaattcttaatgagaagaacaatcccaccatcaagaaaaatgataggaaattttggcagccatcagaattatctgataaataaaatgataagggaatgagatgcaatttcatgttttccagcaaaccaaaagcagggctggaaattagaaaccaaagtactaacaccattgacatcttattcagtctttccagacacatttctgttgtcttgtcactttctgtagtatacaaagaaagtcaccatcttttctcaaagggatatgtgactattttcgtgagagttattcacatatcaagagcaaaaataacttataccattcctatacaggaacttcctaaggcctttggatgttttaagatattaataattaataatgacaatgataaaaaaagacttcataaatatgtaattaaacaaatttgtgctgtcttagaatgtctggaattttatgttggtttggaagagtgttttatgaaaaattatgattattaagtccccagaattgtctgtcatgcttataaacgtaacatttgatacagatttctgttcataaaattggacaaaatgagatcttcctgtttaactgaattgaaatggtatttgaaagttttccttgtaaaaaacaaaaacaaatccttacatcaagacgtcatcttttcccagttgtaggtcagaaataccttaagttactcttattaatccaatgacaccacacatgcacattccccactctggcttacacacatccgtgagaggttaggtgagtgggctgcacaattagcaagcttgggtttgagacctcaccctctcacttgccacctatggattttggggaaaattatgcaacttttctgtgtctcagtttacttttctgaagtctttgccttttgattcaatcaacattttaaaaattacttaaatttgaaattatggagatctcctatgagaaaataatttgtttctctgattctttactacttttaattatatttgcttcatcatgtgcttatgaagattaattgaattaatatcttaaaagcatttagtatagtgtctggctcataataagcactaggtaagctgtgtctattgttatatcctctttctgatttgtacaagattattttatatcaatagatgtttagtgggaagcactgttgaagcttttggtttttctcccccaagacatgtttttctaatttctttgacacactgctatgtgaaatgcatacattaaatacattgacataaaataggctctgtttaggaaaggatgtacttaaacaggttgaagtaagaataggagctcacaaaatgatcatctagaaattgttctagagtctagcccagactctcattcattcaatagttattacatactgtacttgggcttgggaataccaaagagttcttgtcagcatctggtgagtctgaaatcaaaggacacacggccaattaaataccaccaccccacccaccctaagaaaaaaatgtaaataaaaacagtttcaagtaagagattacttatgtgagctcttattggtaaattctagggataaatttttacaagaaccattttgctttaaattctaaatgaatggctttatttctttattttttctttgttatttagttctttcttttattcaataatattttgaatattttgaatagaaccctcacgctataccaaatacaatatcagaaattagagatgtaaaggtgaccaagacagacaaggcttctgcccttgagaggcttacggtccagtaggatttgaaagacagtgaggaacttaatagttctgacaaaaaacggatgcactgaccagtggaacaggatagagacccccaaaataaacttatgcattatggttaactgattttttttttaacaaaggtgccacaagtatgcaatggagaaaggatggtctcttcaataaatgatattggacaaaatggatatttacacgcagaaaaataaaattgtaccctttttataccatatacaaacatcatctcaaaacatattaaagattcaaatgttagacctgaaactataaaactactagaagaaaacgtacaggaagtgctccattgcattgtttctgggcaaggatttcttggatgtgacttcaaaaccacaggcaacataaacaaatgagattgcatgaagccaaaaaggttctgcacatcaagaaaacaattaatagagtgaagaagtaacccatagattgggagaaaatatttgtgaagtgtatatctgataaggcactattatccaaaatatataagaaacacaaacaactcaaaataagaaaacaaataccccaatcaaaaaatgagcaaagaatctaactagacacttcttaaaagaagatatgcagatggccaacatatatatgaaaaaaatgctcaacatcactcatctttgggaaaatgcaaactgaaaccatgatgagatatcaccttgcacctattaaaatagctactatcaaaaagacaaaaacaacaacaacaacaagtattggcaaaggcttggagaaaagggaacacttgtgcatttttggtgggaatgtaaattaatataaccattatggaaaacagaatggaggttcctcagaaaactaaaaatagaattaccatatgattcagcaatcctgcttctgggtttcagtccaaaataattgaaggcagtacgccaaagagatatctgcattcccatgttcattgcagcattaatcacaatagctaaaaattagaagaaacctgggtgttcatcctcagatgaatggataaagaaaatgtggtatatgtacacgatgcaatacatttgctcattttttgattggggtatttgttttcttactattgagttgtttgagtttcttacatattttagataatagtcccttaacagattgttttattcagccttaaaaaaaagtgggaaggctgggtgtggtggctcatgcctgtaatcccagcactttgggaggccgaggcaggtagatcacgaggtcaagagactgagaccatcctggccaacatggtgaaaccctatctctactaaaaatacaaaaattagccaggcatggtggtgtgtgcctgtagtaccagctacttgggaggctgaggcaggagaattgcttgaacccaggatgcagaggttgcagtgagccgagatcatgccactgcactccagcctggtgacagagcaagattccatttaaaaaaaaaaaaaaaaaagaaaaaaaaagaaaaaaaggctggaaattctcttatttgcaacaacatggatgaacccggaggatattatgccaagtgaaataagccaggcacagaaagacagataccacatgatctcacttatatgtggaatctaagaaatttgaactcatagaaatagagaatagaatagtggctataggaggcggggggaggggatggatggaaaaataagagatgttgatcaatgggtacaaagtttcaattagacaagaggaataggctttggtaatctattgcatagaatggtgactacagcaaataatagcgtattttaaatttcaaatcattagaagaatagatgttaaatgtttttaccacaaaaaagtgctaagtatgtgaggtgattgatttgttaattagcctgatttaccattccgtgttgtaagcatatattaaaacataacattgtatcccataaatataaacaactattatctttcaatttaaaagaaattaatttaattacagtccacgtaattgttattagttaagtaaataggaagacatgatgaagagtaaaagttctgctaatgggggcttccttaagtaggatagtttggagaaagctcattttgagctgaaactcaaagaataaaaatgaaacagtcatttgaatctggagaaagcacagttaaggccaagggtccagcaggaagcgcaaaggaactcgaagataggggtgggcatgaagtattaaggcagtggtccaggaatatgagcaggcatctgaaccacctggagggcttgttacaactcagattcctcaattctgcccccagtcagtaggtctgggtacagccttaaagtgtttttctcataagcttccaggagatgcagatgctgctggtttaggagcaacactctgggaatcattgtgttaggaactaaaaacaggagagggctgtagcactgtgagctagggacatatggtaagaaatgagactggagaaggaggcaggggctcctaggagctcaatcttgaaaggaggttcaaggttagttccagattgttgagaagttgaaagttctattaagtccttagtgacaatactgttgttcttggatgcttacaatgtagtcagtcttccggtactatctgattctacatggcctttgccccttaatgcaagtgaagcaaattcagtggaattgataaataacctataatccccgccctgtatttggtccctgatgaacttctgacaaatggaaaagattgcatactttgcagagtgcagacatgctcctacactcaggttttggaagcatgatatagcaaatcaagggtggttacaattcagatcaccctaacatttactggaacactttctgcatcttcacaatagacttagtgccacaaggacctaaccagagaatattacctgatttctaatagcaagcagctttcaaacttttgatgataaaatagtaaaaacataaagcaattagaggattatatgaggagaagacagtgcaatgcgtaataaagtgctaaactgaatattatatgcaaaaattaatgacgcagataataattgctatggccacaacaaagcgggagaattattgtttgaagttattgactaatgtttcatttgaagaaggcattcaggctggtccttagaaaaatggttaaaatttggcagttagagggaaggcgaaagatatggaaaaggcttcgtctttagattcaatcaacattcaaagaattattgtgttttcccagagtttttgctgttttactgccttttacagtaaaactttccataaaccttccatgtgtttctgattattgagtacaattgaattactagccaattgtatggtgagagctgtttggccagggagcccctgtggacttctcagaagcttttatcctttgaaagaagctgtcctgatttaccattgttaatgaaacttgtataacacaatgcttgagtttaagacccactgagaacatgaccacatacctcctttcatctctacatgggggaaccacatggccaataggagctgcagaaagccagcagcagtactgtaaccccagtgttagtaattgttttgaactttcttatgtcatatcctcatagcattgtcttatgagtgatggcctgtcctgcttccacccttcatgaataaatacaaaatgccttgccacccagaagacgaaccctttgtagtcgtgcatctcttttgaacatgcgtctttaggaccctgtgttctttcatttcagtattcttgcttttgtgaggcttacgttagaaactgtgaaatatgctgttattgcaatggtaatatgttttaccctgtcaagtgcttttatgcattagttcctgactaatacatttggtgagtcaaagggctcatctcgtttgctgagattctctgggaaattcatggagttatactgaatattaagatatttcctgtgagctcagataatcctaaatgtatagatttatctttaatcccaaagttaaggcagaaaatgtcagtaaaagagagagaatggttgaagagaagtgccaggcggaccgaaagagtttaatggcaatctgtaagagagagatcatcaaaaaaattttaatgcccccacatgtcagtaaaagatttggagaatgccttcaaaataggtaaatttacttgtaagttatatacatgtactattattcttatatattaacatatgaaagacacacagaaatagaaataatttagaattaattaaaagaaacacaatttctaatattttctttctatagcacaaatgattctcttttgcatgctccagcgcatgcacactccatttaagagaatccatttttagcttggtgcagtggttcacacctgtaatcccagcactttgggaggctgaggtgggcagatcacgaggtcaggagatcgagacgatcttggccaacatggtgaaaccctgtctctactaaaaatacaaaaaaattagctgagtgtagtggcgtgtgcctgtaatcccaactactcgggaggctgaggcaggagaattgcttgaagctgggaggtggagattgcagtgagccaagatcgtgccactgcactccagtctagcaacagagcgagactgtctcaaaaaaaaaaaaaaaaaaaaaaaagaattcatttttagaatacctagagcagcagtgtgctgtagtgcaacggctttcaaacttcagactgcatttgaatgtcctggaagcttgtaaaaacagatgtgtgcctccctgcaaaagtttctaattcaatgggtctggggtgagctccaagcgtttgcattcctgacacattcccaggttgtggtcgtctgagaactacacattgagaaccactggtatagtccacagcatgcgttttagagttactttacctaagttggacatcagcatccttcaattaccaaatgtgtgaccttgagtaaattactgtgtcttcccgagctcagtttcttaaaatctgtaaagtggaggtaatcataattacttacctcttagagtacctggagagctcagcaagataatgtaaatacattgtttagtacccagtactcgccccctaaaaaacatcaatacatgttggctgctaaatcctccttcttctccttctcttccttctcttcatcattatcaatatcattaaacatctttttttatgtcacgaagtagatatagggactgttggtttcaggattaaaaaaacactgtgccttaatttataagaatcatgggaatgattttttttttctgagttagcattctacattaaaaaaagctataatccaaatgagatatctttctagttgaaaggtagagatgaagctattttgcaaagtcaacccgaaggagaacagtgtgttcagccctctcccttctgtgtataactgttgatagtttgtggctaagtgtgtatttccgtcatcttttgtatatactgagttcttgttgcatgagattgagttgacaattttggtggtgtgtcttcaaatgtttgggggcatgagaatggtaaattcaggtgatttccttgaatctaatttttaacatttcttctctctctcctttttctttttttcccctcttcttgtgcattactaggacccagtaccacctgccaggaagattcatgtgccaaccagggggtctgcatgcaacaatgggagggcttcacctgtgattgttctatgacctcttattctggaaaccagtgcaatgatcgtaagtacaacaacctttcatactggaactttgtgaagatgtttggagatttggagaatcttaaaggacaatatgtaaaaggatggctcttctgaaagattcataagtaattctctcctccagaaacttgggaaataaatgactagtgctcttatgagaagagtgaagagatgtgtcttgcttaacaacactaaatattctcccacttgctcactccctgtgttttttctttagattagaatagcgactgagaaacaataaccacagcagcaaaccatttcaggcaatatttttgttgtaagggcttcagttcttcatgaattaaatcaccttatcttattgaatttaactccaaattggttaataattttgagactctccccttttgcattgcctagaattttgaggctatttaaagggtatagctgttttctcaaaaagtttgagttctctgaatttcttaggccttacaaatgacaaagacattcaagagtttattttttacaattagcaaagcttaaagcgttcttgggtatctttcagatatagggtagaaattctctctgactaaatttattggtatctggtttatatacacatagctattctgtatgtatgtgtgtatatatatgtgtgtgtgtgtgtatatatatgtatgtatgtattttctattttgtgagtatattttatatgtatatattatgtatttggtttttattggaagagagtcttgtgattgttaattgtgtccactagtgatgcttctggctcgtgggtttagttctgacttcatgaaggtgcttctagcactgatggtggagacacctcaatgctgtgggcatctataacctgtgtctccacttctttctcatgttattttcttgatgtgaccatagtaaagatgagcacacacttgaaatttctgaataaccgtggcaaagagatttgttgaaaatccctgactctgtgggtcctgctaaccttctgactttctaaatgcagcctttgttttataatccagactcatttgacctcttggttttagaaaaatgatgcatgatgttatctgagaaaatagtaaagtcacattatggtgtgaccacatgggagcagacaccaattacaatgctatgccccccagatctatgtggtttttttgattctttatttctcagctttttatctgtgtgcagctgtctgttgttgttctttttcccgttttttctcagtagttttggtcccatatgctctttcattctcttaaggtacactgaggagaaacaagtggagaagttggcaatatagagagaaaattatgtaatacgcattcatctaattacataagcatatgtctctgtatctgtcatgtgaaggatacgatgtctggagaaagttttggtataagactgctcttaccaagtcttttggtattattgaaagtcatgttgccatatttatgatgtggaaatactgtttcactctgaaacaggtagttataaacccagccagccagagaacctgaggaattatactatatgctctttctttttcctccaatttgtcagtatagcactcactaggaaggcttttttctctaaatggtggcataatgcttctttatcctcacaagtttatttcttgtcgcatatacgtccctttctgggtagaaaatggtcaggaagagactctccacacagaacaggtataaaggtaagttatcgtaacgtggtgagcacgcacaattttcagaaggtaggtatgtctttttctgtctttgacaagttcctgtctgtcacccaatgccaggcattattttctggtaaaaatcaggaaggattctttctagcattctgtgactgtttctggttttatcaagagcagattgtgtctcattctgggatgtggagtatcacactgtctgacttggggaatttgttgggatataatgaagcactagaacttacattgggaaaatgtcagctttcctttgtggcaacagcttatcacagttcaaaaacatttctagtaaatctaggtttagggcaatacattttgaattttattctgtaacaatgcagctaaatcttttcattatagcagacttgggaaactgcctctctaacaggagctacttgcctagtcccccacctggagattggaccacggcttctgtgattggatagatacatagatacatgcaaatgatgaagttcacatctatttttttttttttttttttttttttgagacggagtctcattctgctattgcccgggctggagtgcagtggcacaatctcggctcactgcaacctccacctcccaggttcaagcgattctcctgcctcagcctcctgagtagctgggattacaggtgcctgccactacgctcagctaattttttgtatttttagtagagacagggtttcatcatgttggccaggctggtcttgaactcctgacctcgtgatccgccctcctcagcctcccaaagtgctgggattacagggaagtacacatcttagttgtggagtgtgataagtatatagaattgagacatataggatgtgactgtgaagtttgaatataaacttttaatgaaatccaaccaaatatagcagaatggtagattgtttaaaattattacattggacgtttctgtttccaataattggtattcaagttatctggaagaccttctgttttggaactagcagcaaagccagtttgttctacctagaaaaagcagtctcactatatcatagaccattattttctatagcagccttgacccttagagttataattggctatttcatctcacaaacatcttcaaaatgaagttacctgcatgatattctatatgcttacctttgttgataaatttttggtggcgtagcctgtatcaggactcaagtgttaaccttcatcatcaccggcagacttgaataggctcatgcttatcatcagcaaaaagtggtgggggaaattgcaaagaaagataagctcatggaggaggaagaataatgatgaaaaggaatatagagaaaatcagaaagtgggtcttatatggaagagcacagaggtcatcagcaattgctttggtaacatgcctgccacaagtggcctgcctttgacctaaataacagaaatgggtcacagcattaaaagtcgagtgccatcaaggaaacctggcttttacctaattaattcctgcaaagagagtgttctatagaatgttgcatatagctcaaacaaattgtatccatttaaatgctatcataggaccatgcaaataggttagagatgaaatttaattgtaaaaagcattttgtgggggaaaaatggttatggatatctcattttccagaagctgtttctcagggcaacagattgatcctcaattaatgaacatgaaaacacttcagtttattactacatatccaaaaactgaaacttactcaacagggaaatagctaggtcttatattttccaaaataaggtactaaatccatcatgtgtaaaaaagttaatcatatgtaggcatgacttgtaaggctctaaaaatgtctgcattttagggtattcctttttcctagcattggttcttttatgacctttgtgtttttcttgcctgtttaccaaatatgattgcctgacaatgttaatgtgctgttacatagatgttgcctctatgagtacagcgtacattttaaaacttagtctcatttagtgtgagttggccaagcctggatgttttcactttatttctttattctttgtgtgaccctggtgggttgatggaggcagtgggatgaatttcagtttcactcttataaacatagctgtgcaaagctgatattctttagagctgattgtcttgtataagagtgactcccttgtatggggttaggaaacaaaaatcctctgattggaaatccaagtgtaattgatttgctaattgtcttacatagttttagatatgaccttccacaatgttatgtaatggtaaagtcatggggagtttcttttgggttgacttttagggctgttttgattctgcaatctaatcatcccagaagaaatgttgagttaatgtagaagtcagtatgatctgtggaagaaaacataagtaacattctccaagataatcttcagttctcgtgaaacatttaaaattgagggagctggctattcagagggtgagcaccacctgaaaatcaacttaatgaaagctgtcttgggctacattttaagaacaacaaaagaaatggaaccttacaaaggttcttgataggcatattcttttttgatattgggttcttattagtattttaaatcaggactgagaacctgggaaattctagcatgttgtagccatggcagcaccaggcaaatccagaatctccttcctgtattttgtggtaatattgtcactgtcagcctgctgttgagtttttctttccttcaaacatcgaaaaatgttgtgtagaatagaaccctcctgcatgcacccacacatgtgcaaaagggttgtcatttttatggactttgtgaaaatagcagttttaaacatttcatacctatccttaacaacattgttggcttttaccatgtacatgacaactgttttgagtggcatacaatttgggggtttggttattgcttctggtgccctggagaagcacatataggacagtctttggcacatgagtccttaacacacatcaagttcctgactttatgaggtgggtgctcatcatggctttgtggggtgaagtaaagggaatgaacgtgggtcctcagcccacccttaggagctggccaccctgtgctacattgctggtcacacactgcaggatgcctgttggagaaattcctaggttcacactggcatgtggtaatagatgttctttgcttgcaacaaatcaatagcaagcagctgtggatagtgcagatagtggagtgtaaagcgtctttttcagacagttttctgcaggagtggctattaagctgcagtgttggctattgattggccttttgctttttatttattgtgtgggtttatttatttttttaatgtaggttggtgtattgattaaatctgttaaaaacacatttcccattcaagcttcagaaaatacaagcaatgtatgcattactcagtgtgcaaagaaggggacagatatgtgtatactgattctgtctcttgggtccatataggtacatagacattatgttaaaaacctatgttgttatgaacctatgttgttccagacctattggtatagcagtaatttttaaggatatcatagtatagtacatccatgtttttggttatgtgttcattccccgccattgttttcagactctacctgcccagcgaataggccatatgtaagaagttcacttgtaaaacaattgtttgttgcttagaatgcactttatcatgtattgattcattcactcaccaaacatttcttatttgcagatataatcatgaataagagagttttgttctcaaagaccttctagtctaatggggaaagacacatatgaaggtgcttcagtagaaacatgaacagtgtatagcgaggagtcataaggtggagtaatggcagctgtccccagggttgagactctatgaagagcagctgcttttaggatggttttcattgaagatgagccttgaaatttttttttttttttttttttttttttttttttgagacagaatctctctctgttgcccaggctggattgcagtggtgcgatctcagttcactgcaacctccgcctcttgggttcaagtgattctcttgcctcagtctcctgagtagctgggattacaggtgtgtgccacacaccacgtccagctaatttttgtatttttttagtagagacggggtttcaccttgttggccaggctggtctcgaattcctgaccttgtgatccgcctgcctcggcctcccaaagtgctgggattacaggtgtgagccactgcgcctggctgccttgaaaatttacaagtaggttcaaagcaaacatggtatggaagagggctggaaaggaaaggtagcgtgccagcaggcaagcagggaaaatatatgctgcagtcactgttaacattctgcatgtttccttccggtcttcattttaagcattagcatggttcagatcacattctgtttgacatttttgccctgctttgtttggtttaacactataggctatgcatttttcaagatataaaaaaaaattagatttcccaacttctttcaatagaatgcatgttatggtgcccaactcttggggagaaactcccctatgttgaaatcattgctgagtcctaaatgtaggcctcatagggctcaaatctggatttatttcattgagtcgttggtggagatcgatcttgaaaatttatttataaagaatccaatttttaaaagtttgatttgtaatgtgtataacttattaaatgataaaagaaatcaaagcatagtcattaatttaattggctctagaatcaaactgctttaaatgccagtcctgagtctttctatctgtgaagttgaattgttcacttagcttcctgaaactttggtgtaacataaggagtgtaataggtacttggtaaataggattagtggtagtttttattgtagctaattataatatttgacaactgttaagtccttatcatggtcctgacactctactaggacctttataaggatatcattcttttaatcatccccaaattcttaagaaaatattatagtacgatactcctgattttaattatgacaaaactgagatcacactgttagaatatagctgattgagggtttggtcccaggtttgtctgacataaaagttcacattcttattcgatttgctgccacttagtcattattagaaataacagtttaacatctgtactgatattagactaggatgcttaattccatgtgggcaagtcttcacagacaatcaaactgcataaaaacatagaactgggaaagggaaattgtgttcttgatgattatttgcatcatattgtggaattcagaacatttcaggtcttccttcttaacactcagatgaggccatttagaattaaaatgtctttagccattatagaattagagtatcttgcccatactccaaactatttatattttcattctctgttgacctagatcttctgatttttatgtgtttgctttatttcaattccaacatatgtcatacagcacggtggacgagaccactaatgtgtaatggggtggcctgtgttcaaatcatgactctgtcccttaatatctatgttaccttggacatgataattacagtgcttctaaagtgcagatattttgtaggtcctatcttgtaagaataaattttacaaacataaattgaataataataaattgaatgtgtagtggtgaagtttaggagatatggcacatgatggccctgccggctactcttcgatattactttcaaaaagttaaaaacatgactcatacaaatataattattataaagttaaaaacaaaacactcatgcaaatatagaatgaatgtgtgtcaaatttatttaactccataatgagagaaacaagatggtaacagtgtaaacaagatgacaaaagactatttgaagaactggatatttataggccttaagaatattaaaatacaaattttagatttaaaagtggtaaatgtcctacaaagcaaaaatctcttaacctttggtgttatcttttctatggaacatctgtgctgaacaaaaatctacaggttcagagggcatcttctgtactctgggcccccgctaacaataaatgtcagtgccagtcacaggttcttctcccatagagctaaatgtttctcgggtgggcctgttaaacagtgtccttttataacattagaaagacacatgatttttttcccctaacttttgccctatgttttggataatttttattaatttatattcagtttcatttttcttttttaccttgaatacctctttcatacacaattacgttttttaaccgcttaacagtgtgccccaatgtgctgaattcattgtcatttaaaccccacggcaaccctaaaagtagatactattgtgataccagtttcatagatgagagaactgagacagaaaagtcaagtgatttgctcaaggtgacaaaactattaggttgaggaacaaagattcagagttatgttagtctgactgcaaagtctgggctctggactgccaatatcttcttaatgcctcagggaaagtttcctgatgagaattcatctgaattcataggggtttagattcacattagccacagagcttaacgacttttgttagcatcaattatactgtaatttctagtgtctgtgttattcttttgggggggatgctattttattttattcactttaaatgagggcatttaaagtaggactgatttgctcggggaacaagatcagaatttccatcaaataagtgccattttgcaggtttggtacatctaagcagggaggaggctgagtcctgagaagtcagtgaggctgagaggggcagcatagctccatgataaccaggtcccagaaggcgagacagatgcaaaagaaacgtcaggagtggcagcaccaaaggttatttctctgcatctgtttttattctcgggcccacagatattccatggagccaaagggaagtcagaagataacaatgaaacccagggtcttctaagagcagaatgaagctagcggtactcttaggaacagttctatagatgtgggttgtagcttgttgcccatgggaatcacacttgcttttaagttccatcaatattaagaagggatgatttggagtattctcaagctttatcagggctaatattaatatgtgtgcaatactaaaccgattcagcaagagccaggactgcgtgcagctttgtttttcacaaccctccctgaaaataagctgggactcataggtgacacattggtttctacaaaccccagtagacacttggtcctatggttcaagaaaaaatagtctccataattcaaaggcatatagcttatcatggattatcataagctgttggagtttgtggcctcaataatttcatttccaccatcttccacatgctatatttgtagaccattttcattgctgtgtttaattatagcccattcatttctggtgtccttggctagttacttacttaaggtgacggcaataatccacttagagcctattgcttcacggaagacaatttttgtattaccatgttagtcacatacaggtgcaattccaacatatttttcaacatggacataatttcctatagttatttccacatctaaaggcacaagaaagatctaaattactttactttgtcttgtaaaatagaaataataaatataattttgttcttttcatttatttttctcctctactttctttttagggaaggaagagatcattttttgaaggtggtaaaatttacatccagcaaaatgcatagatcttacatgcattatcacaaatgcttatacccaagtaaccaacaccagttaagataaaggatagtttcatcttctcagaaacttttcttgttccctttccggttagttcttctctttaaggtcattgctgtttgaatttgtatcagcatttgttatttttgtctcttctggagtatatataaatggaatcatacaatatgtgatcttttaggtctgttttctccagctccatgtcagctctgcattctagccagctgagagtctcttctgagtcttagctccatctatataactgcaggagttggctggattccagctggaaccttcctgcctgctccatgatgcagaaattctctccaggcagtaagctggagcagtcttaaatctcacagtttatcttctctatttcagaaaccactgctcttctttgcctgatgtctcatgtctcatgagccattgtttcatgtgttgtcattttcccggttatatcaggtcagttgtagttccagtctttgttactccatttaggttgaaaattgatgccaacctattcttttttacctgacttcacctttgcactgtgagattagggtgaaggtagcaggagaagacataacatgtaatgggctgtgcttcaagccgcaaattctaagggttttctgaggctttacatcagtcccagagtgatctggcagtatgtaatattctacaactgttttatttattcatttattttagggaaaagccttcaactccagtgataatccctctgtagtcaaagaaccttcttggccaaagaaaacgttgcaagaagctgcgcaaagctagttaaagacttgccaatgtgtctctatcaagtatttattaatttgagtgtttctgttaggagggctacattaaatttttttttttttttttgagaaggaatcttgctctgtcacccagactggagtacagtggtgccatctcggctcactgcaacatccgcctaccaggttcaagcaattctcctgcctcagcctcctgaataactgagattacaggcaccagccaccatgcccagcttttttttttttttttttttcagtagagacggggtttcaccatgttggccaggctggtcttgaactcctgtcctgaagtgatcctcccacctctgcctcccaaagtgctgggattacaggcgtacattactttttacttccactccctctgaaaacacttgattaagctcagtgattgcaggcattgatttgacttgaaaagctagtggttcttattattttcttcacttagaattatagtttattttctcaacctacccttttcttgtggatctttgaccactgattcatgtccctttgccaagtgaaattaacaaatgttttcaaacaaagaatttggagacttcagaaaagtggagttgtttctataccttgtagtgttttggccattgactgtccttattttgatcaccaggcactggtttgcatttatgattttgctacatgcctacggaagaaatgaaggaaccttgcattattggtacctttgatttaactgagtttttttggatatggaaattataaaagctcactgctgaaaatgtggaaaacacataaaagtatgaggcagtaggaaaaaaacatgcttaatttcatcaactattaatatgaccttgtttcagaatatgcatgatgtcaggcacataacagatactcaaaatatatttgttggttgaatgactgagtcttgcatattttcagcatctgagttgtgcaaagatcttagctttcttttcatgaaaagaacactaacagttttactaggactaggtgttttcttgccagaagaaatgcttttaggcatatgggaattataataagtatcccaatatgaaatttccttcttcagataaaaaatgaaaatgtcaagatggttccatttcttttcaatcttgcccttctcctttctcaaagaaagccttgctgtttctgaacagtcattcatacatacatctatataaaagggaaatggttttacagcggatcatggttggagggaaaacaccgctataacataatatgggaaaagagcctcttggtcccagtttcttctgtggcactcacttccaaagtgatgttgtggtttatttcacaagatgagatttcttgtaacagtctagtactctagtgatcgagtgagatagtagaactttatcgtcaatcatcaaatcccacagttttatgttgaccaaaatcagtactacatgattgaagaagttggatgcattatatactgaaaatgtaaaacacaaaattcccctgatttttttcacaccctggattgcaaatttttatttccctgtaggagaattcagtcaaaccttgtaaactgtaacaactctcaggagcattggtaagaaacaatatcatctaacttcaggcattatttcctggtaaattaactacatgctctttgaaatcagccctttactaaatctaaaactgcagttttactcagatattcttatgtgagtgaaatcaaatgcatgtatgtgcatacatatgtaatataaataaatataagttttctttaggagttttcccaattcttctgagatgatttttctatccaaatacctttgtttctatgtcttaaggagttatagctttcggttgcatcttagtccattggcaagacttgtatttctgtaatttctgtaaaggtaaggtatctacttgggccacagatcaggtatctgtctgcctttgtggatgtttggcataaagcccctttattccacctaaattctcgatatttggggtatgattttatttctgtaaaaaaggatttaggcagggaggtgtcatctggattttatctgcccttaagagtaagtgttctttctcctctccctatctaaaatttccatgtgattccctcacactggcactaaagtgtgtcatctggttagagctcacatcagtgccctgctgctggtggaggttgcgggaggtgagctttagaaaagggcctgcagctcaacatacatgtcatggacacaatcgtattgtccccaactcatgaaaattcctgagaacagagcaaatcaaaaataatatgttaaaacaagaaagtttagtgaaacaaactctcggtattgttagaggctttattctaatccctacaacacagcacatgtattctcaacatctaacatatttaatttgcatttggattcctttagcatattgtcctattatataaagtttaatgaacaataaacacagctataaccaaatttcacagctatttctcagtgtggggtaagattttgcatttagttatatttggtttcctaggtaatatttgattgtggctctatttcctgaagctgcatctcttgtcacatggaatcttttggtggcggattctgccgaccgaggggaagccaggaaggagtaagttgctttgaaaccactgaagccatgatagtgaagaagacttcacagtccttgacagtctttgagctctccattgttgttctccaggcttgtatttctgaaatctactgtatgtactagttccagatcagtcttgcccaaataccatttttatcctgtcattcctctgctcgtgaaccttcaatgacctcttctcaatgtagtccaaaccctacacttggctttcaaggtcttccagaatctgtttttcaaaagctgtccctcgaaccacattttcttgaatattcatggctttctatattctaataaggtcaggtttctcgctgtcactagcacattctgtcgtcattatgctccatgcccttgcagctgtacttctttctccctggaaggcgctcttctctggatctatacccctttggggttcagcccaagtctcacctattttcccgagtcttctttggtcagttaaatccatactcatgccttatcccaaatcccactgcatttatattcagtgctgagagacactctggcttggcatctaaagggaattagcgtggacctgagagtaaaaggtcagttcaagttctggcttcttttctttctaatttttgtggcatttgtcaattaatagaaggtgatcttactatggaagtctcacaacagtctcagctttgttaacaaagattataaataatgggggcaaagcagagtattgggcctgggaaagagtttttgtaaagcttcaggtagaaccttatgttagaaatgtaaaacctcctctaaagaaaaatgttaccaataaataaagcaagtaggattttgagtagattatcatttttgttgtgtattcaccctgtttcctagagaatcaactttcctactttgtgcttactatagtttcctctagagtaggggctaactgtgtagaagaggttgtgtgtgggtcgtagggttactgggattagactattcaaatagcacaaatattctgtgtattctgatttcaaatgtaaacatattcctgattggaaatgtgtatatgtattttttatttttagttctggggtacatgtgcaggatgtacaggtttgttacataggtaaacatatactacggtggtttgctgcactatcagcctatcacctaggtattaagcccagcatccattaggtatttttcctaatgctctccctcctctgatcctatcccctgacaggccccagtgtgtgttgttcctctccctgtgtccacgtgttctctttgttcagctcccacttatgagtgagaatatgcagtgtttggtttactgttcctgggttagtttgctgagaataatggcttccagcttcatctacgtccctgcaaaggacatgatctcattcctttttatggctgcatagtattccgtggtgtatatgtatcacattttctttatccagtctctcgttgatgggcatgtgggttgattccctgtatttgctaatgtgaatagtgctgcaatgaacatacgcatgcatgtatctttgtaatagaatgacttatagtcctttgggtatatacccagtagtgggattgctgggtcaaacggtatttctggttctagatctttgaggaattgccacaccgtcttccacaatggttacacaatttacattcccaccaacagtgtaaacgtgttcctgtttctccacaaccttgccagcatctgttgtgttttgataagtccgtataatttaattagaaacctaagtaggttttggaggacctactacctttacttaaacatcctgaattttatttatttgtttattttagaattggggtcttgctctgtcaccaagactggagtgcagtggctattcacagctgtaatcatagtgtattacagcctcaagcttctgggctcaagcgatccttctgcctcagcctcccaagtagcttgaactacaggaacccatcacagtacccagtatatcctgaatttttaaggcagcctctccaagaacattctgaggtgttctggtgtctttagtaatcttatctcctaattttggttcttgcctggaatgaagaaaattactggtctgtgaatctttggctcttgtcattgtaagacttagggaacaatgctgcaatttttgcagcctctgtaatgaccagaactttcaatacacaatcttaactttgtagatattaacttatttttaaatctgctcatttaaagccataaaatgtaatctaatttagtctttacaatgaaatatttacagtagataatttcacagtcactgctccctaattcaaaacgctttgagcctgaagctctaaggccaggccagcttgagtctgatactgatgtgctttaacatgaaacgtgagaccaggaagtggaagacccgtagccaaactctcatccttattcacagtaaatttcttgacagaagaaaccagggaactatggggtttctggtttattatctgagtggtctaatgcaggaattattgcctgccatggggagatgattgcagatcactctccggtggagtttgactgaacaagaagccacatcccaggtctcaggaataatgttattccacaccctccctgttactcaggggtgctctatgatgggctcagctgccgaacattaggggattcgaccaaaaccttaatcatggcgattttgataatcagttccaatgagcagaatcctgtgggctctgtgaaacccgtgaagctgatagtattgaaggaaatgaaatgtgataagtgtgattgcttgacatgccagaagggggttggtggagaaagaattcaaaaaagaaaatttagctatcttaaaaactggcacttctgagaataattatgtagggaatttgcactttcatactctaggtgtttctgagaacaaacacatcttaagaatttagttagaatatgtagataataaagatttaaactgattgccaagggtcctcacacaggaatgatttttcttttatagttaatttattaatttgagtaaaatgtgattcatttacttctgagcctttgcatggtgttcatataaatagtgttgataatttctttctttctttttttttagactgtatctcactttatcatgcagtggcttgatctcggctcactgcaaactccacctcctgggctcaagtgatcctctcacctcagcctcccgagtagctgggactacaggcacatgccaccatgtccagctactttggcatttttggtagagatgagtttcaccatattgcccaggcaggtctcaaactcttggatgcaagtgatgtgcctgccttggcctcccaaagtgctgggattacaggtgtgagctactccacccagccaatagtgtttgtaatttctgatgacaaatatttcatgctaaataagtagccgaccaggaatgaacaagtaattaccaacagtggggcacactgttgtttgatggtatatgttttcctaacatgaacaaactcccttacaacttcaacatctgtgccttaactaaaatctggacatgctgcattgagagagcatctcttggaagtctcctttagtgaaggatgcttttttcctaatgttttaaattcctggagtcagaccttgattctacaatcattcttcagtgatgtttcttcttttaaggtcacgtattttttatatgctgtcgccccgtcctcatcattagcatttattgaccttcaggatgtaaaaaatactctgagttcttcccttgtagccttcttctcactccatcctttgcattgtccttggtgacttaagttttcatgttgtattttttcctaataacctgatttcctcaaatacctggccacgtagcaaagggagtttctattgctggtactgcttcctaagttttcagttctcccataccttaaacctcctgacactactttctgtgtcaataatctcaaatgtttcactagcctccatgtggcagttggagtttctagtctagaatacaaatggtattcccactaatacgcaggagctcttgcctcatgacttgatacactatccaaattccaaagacattcccttgctcggtttcttggcccctgccttacagctagaaaaagtcatgtacttggcaattacttcctgtaaatccatatcctcttaccttagcaatgccctcagtatgttcttttttgtggccatctaagctttgtccctaaattgtgaccattttcttttctactcaataatatctcattttctacgttggtagttagtacttactcagtagaagttatctgatgagagtctttcttcatatttctttgtgtcaaaatgcatttttatgtttaaacatctcaaacctccctggcaattaagacattttgggacttttctccaaacataacattccatttaagtctgggactcactttcataaacccatgcacctgtgggaaaactctcttccccaacgtgccctaaactttattgatttgggcttaccttccttaccttgttcatctagatatgttcaatgggccttgtactgaatatttgtgtggtgtttacatgtttatacatgtttacctgtgtgtgactttttttttctaatttgaaccaggactatgtgattattttacttgtacatttcttagaacagtgtcggtcctcaaaaaaaacgagtgggtttcttactctctttcctttctttcactaaatatttcatcattgtagcactgatcttacacatatttgttaatttttctggctcattgtcaactgtgagttctacagggtaggtacaatgcctcgtttatttttatattcccggtctctgtatcaaacctacataggatttgcaggaaatgagccactgggagtttttgagcaagtgtgtgatatgcccaaagatatgccttagaaagattcctcctggcagagtgtgagaagcaggttgagagaaaatagtaagctttgttgagagaagattgtaagcctttctgagagcagacaacacgtggctgcataaacagaccctagtgcaatgtctgatatatagtgcagattcaatgaatattttggggaagaatgagcaaaatcaagaaagctattaggaggctcttgaaaataggtgtggtaaatggcaaaaaacaaacaaacaaacaaacaaacaaaaaccccaaaagcatgaactaaagtgtcagtactggtaattttagggttagcctcaactttaaaaatagaatataagctgctacatacacatgggcacagccaattatagtagtcaaagtatagtagtcaaagaactggtgaaatggcaaacatttaagaaatttactccatttttaactttataagatttgattattattcctttatagccttagctttttttttgtttttacaattaaagatgtttttaagttaaaataatccacttatattagagcctctttttctattatccagacagcacatattattctatccattaaaaaatgtgaccattaaaaatggctagaatagcttaataatataatatcatatttattctatgatttccagtggaatgaactgttatggtctccctgattgattataattttaataaacttggttgtgtgtggctaggaacaagttcattccaagttcattttttccctgatgtagataaaattccatcagctaagttctgctactgtgccccatctccagacttctagctaaatgaagtactacagggctctgattcttgctcaaactcactactgctaaactgaaatgcttgaggtattcaaaactgttattttctgcgtcaatttgatatatgtgcagcatttcttttttaaaaggacatgttctgaatgtttagagtgtgtagataaccactcccaccccccaacacactcacgtaacagaagaaactttggatacttttattgtgtaaacttacagaatttgtgtcaaagaagttcatgtggcaaagacatcaggtgtatcaaatattttggtggttttgtttaaattcagagtgagaattaaccaagcatctacaatacgtacacctgctctgtattctaacccttttgttcatggcatgcacattaaaacacgtagctccacttcgctgcattgttgattgcagttgatgatgagggttgtcgtttctgtcaacttttagtattgaagagaagcctcatgtgtagtgatgttagggacagttcagccatgttacatacctagaattgtctctgaaaaaaaaaagtcatgaactttttttttttaaaggcaatagaaagcaatcaaccaaccaaacaaacaaacaaaaaaaaacaaaaagtctgggcgtggtggctcacacctgcaattccagcactttgggaggccaaggcaggcagatcacacggtcaggagatcgagaccatcctggctaacacggtgaaaccccgtctctactaaaaaataaagaaaattagccaggtgtggtggtgggcatctatagtcccagctacttgggaggctgaggcagaagaatggcgtgaacccgggaggcagagcttgcagtgagccgagatcatgccactgctctccagcctggatgacagagctagactccatctcaaaaaaaaaaaaaaaaaaaaaaagcagaaaaatgtgttgattacagagttaagggggagaaacttataaatcatggttatttaccacccctgagaaggtaggtacaaggttgactactacttacctcttaatcctatgattttctggttctgtggcttagaaggtttaagctctgtcaagtggctcaagcaggacagcccaaggtgactccaattctctgtgactttgttttcccatgtgggaagtaaaccctaccgctgtgttgtaaactgtttagatatccacataagaaggggttattcggtattttgggggggcttaagataaaagctatctccatttgagaaattagaaaaccatttctacaaatcaactctgttaaaccttgtcgccccaaatcaatttaggacaaaaagcagcagcacattacttttttaaaagcccaattcaattttaaagttttgaaaaatttcaagcaaacataaaggacagaaaatgttaaacatccttgtactcaccactcttaacaagcgtcaacattttgccacatttgctgaatactataacttacttttttgctttttaaagtttttattattgaacacagacaagtactatatgttaatatgtgcaatgtacaagaataatgaaatagtcatatgtctactacccaacttaagagttatagatttattttttaaagaaaaagtataattactttgagcttgccagcgtaagtttcctcctactctctccctgcaaaaaaaatagttgtgtacaaaataaaattcctggggttgacattcagatgaccccaatgaatctgattttttttcttttctttttttctctttgctttttttttttttttttgacagagtttcgctcttttgcctaggcaggagtgaagtgatgtaatctcagcttcctgcaacctccaccccttgggttaaactgattctcctgcctcagcctcccgagtagctgggattataggcgcccaccaccacacctggctaatttttgtatttttagtagagatggggtttcaccatcttggccaggctggtcttgaactcctgacctcatgatccacccgccttggcctcccaaagtgctaggattaaagacgtgagccaccacgcctggcctgaattttttttctgttgctcttcaagttagatggtttaagtaatgatgtttgccgggaagagatttgaggacctaaccgtgagatagtcctgccctgttcaggtctcccgtgtttcctcattagaccttccagcttattactggaaaagcattcttttctccatgttttaaacacctattgagtatgaatgttttaagtgcttattaaatactggttcataactctttgtaagagttaggggagaatcatcaatatctggaacaacaccattcttcatgatattggttttgagagccacgtgggcagagaaataaattctagaaaaaaagaaatggtaatctgacatgcagacttggattataaatatggtcaaaggtgtacttaaaaacaagatattttgcttcttggttagctttactgagaatccagggatcaagtaaaatcattgccattggtactgacggttgagagtcagtgcgatgctaaaccacaggaactccttacttctatgcatgattaaatccagttgtcaggtttgggcagaagagagccctccttttcctcaagtctatagggaggtgctgtgggggagttttctcattttccagaatatacagagcaaggatcatccatcataatcagacaggggtatttcatatcatccatttccagtgagaactgtggtaaaattctgtcctttttcccatttttggctgctgtgattgaaacccgtcttataaacagaaaagggtagtttgagttattttaaaaaataagaatccttcagtctctgttgcccattttctcctctatgaataatttctgcagacaggtgaccagttcaaccatctctctcggttacaaatgcctgtggttggtccacttccttcagccttggagtaaaataaaggcttcttttgcaagatcacgaaataattcagcaaatactgtgggactataaggtattcctgtgttgtcaccttttcttttgaagaatatagagaatatgcttttcttcctctaattcaaatacatagattccttatgcttgtataatgaaagaataagggctctgatacatacatatcattgaacaactattatcagtattaggcaatttagaaaacaaaaaataagacttcagaatttatatcagctccttcaatacttcatttagctggatccatttaaatatttcattttttagcctatgttgtagtagattgcttgattggtccaaggtagtctctaaatccaattagagaaaatgaaattcaggaagcacatcactgtagattttggtacagtgacttgagtatataattgccatctctttctatgttagctcaggggtgggttttgtgccataaaccaaccatccaaccaccagtctacccacctacccacccaactaaccatcatttgggctatatctatctgcatatcatacataatatccttgcaggaattaatccagcatccatatgagtgtaactcatacctaggctgataacaaaatctgaaaggtttttcactgaaatatatcaggtgactaaagaatttcacaacccaaaagaggagggtatatcgatcctagtggaattctatttcatggattttgttctgcctttattgacacagttagacattaaagagaataagtataataacaaaatttataagaaatgcttatggaatattttctaattttagctacaatgatgggttgtttatattctgtggtttgatttttatatcaatctttatgcagctattatcattacccaaacaagtagatattattgcccctttaataacagtgaaggaaactggaatgtaagaattgaggtaactggcccacacaccacaaagcgaggaagtaggaagctggaattcacatccaggtttgtctgttagaagcccatccccttgacctttctgccatattatctttccttatgctgtggcacaaaaaaagaattgtgaccataccatcttcccagagagggattagacaaagtccagagaacgtctagatggtcaggaactctagtcatggcgatgctagttactataagaggatacttggcaaacagcattgcacccagatggtgcgcaacccacacgtctctatttacgtagaggtctcaagtgtttgtattaacaggtttggaggataataaaaggagttgttgtttgttctttctttgtacgtctgaaattaatttttagcataaatttaaaaggggagtttgtaaattcactagacactgagagactggagatccaagcaaacatttgtctgttgagtttaaaaagatctggtgtaaaagtgattgttttctattttgcccactaggtggcgctttggtctcacaggttccttttaatgggctggatttccccgcccccccacctccccccaacccacctccccccaaccccaccccatacctagatgttggtccaggaaaaaaaaaaaaaaaaaacaattcaagactgattaagaggactatgtcagttgagtttgttcagtttgggttttctctatcattatccatgttgataacaaagataattaaacttatttgaaaattttggacactcctttttcaaccttcttgcaataaactgtattcacttattttggaaaaaagcatcaataaatggaactagtgagttatcttctcagcatgtctccacaggctacacttacaacagtctttcctcctacagagcggggcaagtcataggaagtgactaaaaccatgtcatttgggtgttcatattaagcacactggctatgagatcgccccggaatgtatacacagcccaacatgtcattttcttaacaccttaacatcagtgtggacaaaaacaataaggaacaatgttttaaacatgtttacatcaaagaggactggggtcataaggaagcagttcgatgggagaataaataacattattccaaattcaataaaactgatcagtcattctacaaatgtacactgatttgactcattccattaccatgcaagaattttatttgttgactgttgtgaagacattcctgtcatcaagaaggaattttctaaaattataacctgagatagtagtaagtgatagaaaaattcactaaatggcttttccatgaaataatatttatttatacctacttctgaatacctactatgtgctgagcaggtgcagggtgatgtgaaacatatattaaatcccttaaggagcctacagacaaagattaagagatggctgaaagatagtgtatccaaggtcacgttggcacagattactgaagtgagtggggtggcctggaagaacattaagtggacatttaagatggaacagctaataagacaaaggtaaaatgagtctagaagaatgactagactgagaagagaggaaaggaaagaggcagaaatagtagaatgtagaaaagctttaggcccatggtgattatggagaattgcagaagtccagtaatctagagcataataatgcatatgtggaaagagtgggaaattggggccataggtagaagccagaatcagggactttgagtactaaattgagcatgatctattttctagaaggtataggagagactttgaagaaggctgtcacttgctccccacgtaaccctctaagaaggcatgccattcacttccactttccagaagacacaggtgtgtttccccagaagaccatctggatccagaatctgtgcagactgaccatctatcatggtctttccttgtgggaattttaagtcttgactttccttctggagctttccatgcgaccgaggaagtgattatacaatagcagatgagatccttggtataattaaggattgcttgtcactttcaacatttccccccatcaaaccgtggacagagaggccttggaagggtttagttctgctaccatactcatttaaccctgctaagcatattttcttcagcattttgcaagcagaaatttatagtaatgttttttgacactaactctgagtcctgcattctctgcctgacttgctgtatttgaaggtggtagcgaaacacatggtgtatgtgtatgtatgaagtaggaggcatggtggtacagatttagctatgggacttttcagctttgcctgtatgaaattcatttactaagtatatgtaagtgaaattccagcaattcagaaagggttctggaattgcttaaagcccatcactgcttgtgaattcttcccacattaaaatgttatcttacagaaggtcaaaatgtctttcctgcatgaatataataatgacttacaccttagactgtaaccattgtgaatttattctatgtgtatctatctctggttttctttgttggagtggcaagatttaaagcaggccaattttatgcctcattctatgtgcaccaaaactacttacatgatattggttttcagtgcctgctacaacaaaaacaatatcccagtaacagcccactttactttctgtgggtagacaatgccctcacaggggttattaacttctcccagagaagcttttgtctttgcaatcctgaatgcatttctcttcatattagattttaccagtcaccttgttgattatgaaatgctaagtcagggtctttattagactgactttgctttccctttaataattcaggtaattattatatttacagaatttgcctattttttgaaatcaacactttgttaatcaccagacccatgacaatctataagtagccactttacgtggcttatagatctaaagtgaatgttggttttcacacattcattcataactattatttttactgatatattaggcaaaatataagattcatttatgagtttgttcatcagctagttataaaattcctgttgcatggtaagtgctgtctgtattgggcaacagagataaaatgggaaacaaaacaaaaatcttccctactgtcatggggtttacaacacctggacttctcaaaggacactgaatcaaaggttcttctctaagactttgtatgaagtcttagtcagaatcaaagatggttggcaccatcattcactaaagtggcctgagaagtaaaaaacctctgtatggcaaggagcagtgggacctctctttttttaaacttttattttaggttcaggggtacatgtgcaggtttcttacttaggtaaattgcgtgtcacagggatttggcatacagattattttgttagccagataataaacatagtacccaatagcttttcaatcctcaccctcctcccaacctccaccctcaagaaagccatagttcctgtcattcccttctttgtatctctatgtactcaatgcttagctcccattttttaagtgagaacatgcagtattgggttttcttttcttgtgttagttcacttagcataatagcctctaactccattcatgttgctgcagacatgatctcattctttttatggctgcgtagtattccatggcatatatgtatcacattttctttatccagtctactattgatgggcatttaggttgattccatgtctttgctattgtgaatagtgctgcaatgaatgtatgtgtgcatgtgtcttcatggtagaataatttatatttctttcagtatatatccaataatgggattgctggctggaatagtaattctgttttaagttctttgagaaactgccacaaccattggtggggagctagtgcagttgtttggaggtaagaaaatactctggcttgttgagtttccagagttcttgtgaaggttctttctcatttgtgtaggtggatgttccttcaatctttgaagttgctgtcccttggatggatttttgttgctttcatcttctttgatgcccttgggggcttgattgtggtataaggtaggttcagtcaactcatttaagttcgcttttccaggagtcactggggaccaggaatgagtcctggtgcatggtaatcccatgcagagttcccagccatccctctgtcagcccagcacctgtgtcttcccacatccactgtcaatgccttccctctgagatttgctcagagtgcgcctgtcttcgcaatgtccccatctcttggtgacagatgttcctcttggctgcatctagtcagccatcttgaatcaatctctggacctctacttaatatccctgagaatctccttctctgttgtcaccggtgcaccaactgccaaagacaccatttttgcagtgtttggtggggggtttgtttacctctacaattgcgtaactgaatgaccctgagcaaacggtttaacctttctataattaacaggatttcttcttacatccaagccctccctgctgctctgacccagctgtgggtgatagatcattttcaattctgcaaaccacggctgagaaagatggcagtgtgtaaggctcctctgatagattaggaatcatggaaggaagggacattggctgctagctatggctgctcagacagacaacccatgggtcttggttctctctagtggatctctacagggcttccttaaagtcagaggctggctttgccttaagattcttgagcatgagtagaactcccaacccaaagtaaagagagcaaaatccagagaaggacttttctccattctaaggcccgcctcccaagtccttaatttctgttttaaggtctggctcatctcaagaagaatgacacttgaaattatgacacagaaagaccctgtcttctacccaaaggggtgtggcattgtctggtgatgtgggctgcttaagcacgtttaaacacagtagtccaacaccagtaaatgataccctacagcagggagatgtttccttatggttctgttgaattctctggcagaatgtgaattctatccaacctcaagatttgttgcttatctagtacgattggctgccttgtccacaacatcctaaaggccctctgctcttttctcttaaagggcactctaaagtgccttcccagtgtgtaggaacaggactgaaagggccgtttttcttggctgctggtgactttccaaagcaagtgtctttcccttctcaccttgtccatggccccttgtgccctttatttgctctttctgcctgatgtagcagccacaagctgagagggctttctgtgaagtggcaggacctgacataagcagctttgtgcagtgggaaggaaatgtttatgttattatacacctgggacctctaagtccacaaggttcactttttattgtacacctgggccatccttttctacacttctggctcaatttgtttttggtttggtttagaaggttttcttctccctaaaatctcccttaagtcttaggccctttttatgcagaaatgcctgatctccaggctcaaaaaaagcatcttgtgcaagggaaatcgttttagatttaggaaacctcttacacagtaaatttgaattttcaaggtgactgaaaacttaaattcaacaaatatttttatccacctagtttatactcaaagtgtgctagatgcaagggatagcacggtggtaacgatagacatggtcccagctctagtagagcctgtgatctggtggagaaacaggcactaaatcaatagctacaagagtgatgaatgttacaaaagaagagattccagatgctacaggtacatagagcaggaggatttaacctaatctaggggatttggggagttttcatttaactctgctgttgtctaactgaatgaccctgagcaaatgttttaacctttctataattaatagcatttcttcttactcgccaagctctccctgctccagccaaggctcctgggtctatgaactgtaacgtcaagagagaatactgtcaacaacagtaagcctgactgcagagagtaaacacaaggagaaaatggccttggaaccacagagtagactccagagtatcaggaccatttggaggagagaatggggaaaaggctcgtgggcagacagcagtaaaccctgtgatagacattccatctgtccattagtataaacctggcacttagcccagtgatcctcaaatatttgtggaatgaatgaaatgcaaagcaatgtcaatttctgtccacagctgcttgactcttaaggttagtgttgatccctttggggaatataggcgagcagatgaccccatacattggctaactatgaattgagtggatccaatgaccactgccctccttgtgcagatcgccccacggatcactggctgtgtgtgcccatctacccctttctacaagaacttttctagccctgccaagcaactggttctgttcatgatgctgtggggttaccacaaaatacgtaatagctccattcacttagaaagactcatcctagataagaattatcctgcctcatctacccctccctcatagtttttcatctcatccattccctcctcctccccatgccgttatcaactttatacattggaccccatcctgggactcatactctgctaatcctgttcttggagttagggaggttattcaagtggcttggagaggagatggggaaagtcactctagacaagaaacattcagactctacctaggactaaggtcaatcacaatactccaagcattactggagcaaattataaccgtagtcgggtcagcttgcacattctatgctatatatataatgagggagatatagttttcatggcaggttctctgttaacaatgggcaaagactttggggattgatgtctgcagggaaaggatagaaggaactgaaacttctctccacagaagcacctgaaacccagtctgtgggcctttcgtgtcagaatctagtgaaatgattttgacaccacacacggcaaatctgtgcatgtttttctgtaacaaagaactgagaaaatcaggagtccttatcaaagggaacctttgatgaccctctggtggtcaccttttatagtgaaaatgtttggtaaatagagaaaaaggggccaggcatggtggctcatgactgtaatcctcgcactttgggaggctgaggcgggaggatcacctgaggtcaggagttcaagaccagcctggctaacatggtgaaaccccatctctactaaaaatacaaaaattagctgtgcatggtggtaggcacctgaaatcccagctactcgggaggctgaggcagaacagttgcttgaacctgggagacgaaggttgtagtgagccaagatcatgccacggcactccagcctgggtgacaagagcaaaactctgtctcaaaaaaaaaaaaaaaaaaaaaaaaaaaaaaaaaaaagagagagagcaagaagagtgaaagttataaatgaaaacaataaaaaaaaatccaagaaactcaaggaacctttgatgggaaaactgggtttttctctgacctcactactttcccttaaccatcatagccctgccacttctacatgcattggaggaagtgatttctccactttctgagatcctagaggacttaatttgcatctctatgataagaattttaccattatgatctttttattctcatctgttttattgctacaggattatgggctcctctggacagtgttttattcatcttcctctctcactctcctttacagagtaggcccctaataaatatatgcagaatgaataagcaaaatcaataattaatagatagcaaatacattcatgctgacttctatgattctttttctcttttctgtcttaggtttttaaaagtagtacaataaacctattgctagtgtctcaatatttgcctccaagagaataaattgtccttttaagaaacaaaactatctttatctaaatcaaggctgaaaaagatatctaggtacttccaagttactgagcacccctgccctggctttcaggaattacagctgctgattaaacatctgtttccctgccttttctctacttattatccttctctacttattcatccttcaagactacttgaatttttatcttcttactcagtaaaggctttctctgtctaccaaagctggaaacgtttttttcttttctgatatctagcatgactcattactattcccattcattcagtacagatgatgtagggacaagcactttggagacagtaccttggttcaagtcctactgtgctactcagtgatggtcagtgaccctttgatcttgagtttcctcgtgatgttgataaactcctgtgttgggatgactggtctagagggtgagatgaggatatgcatagaagatgcctattccaacacctggtgcttattgagggctccattaaaggcaactgctcttattatttgcatatatcttatgccatgctctagattgtaaattcaagtattatgtatctttccaaataacagcatctgacttcttgctttcagtgagagagatagtcaataaataaacatattatatcatgaaagatagtgataagggctatgaagacaaataaagcagggtaaggagagaaagaaaagggccagggataatgtaattgaggaagacttctgggagaaaggtgcacttgaatagagattgaatgaagtgaggaaaagaattatgtccgtgctcgggtggaagcaatgcacttgataggtacaggaaaggaaactccaaaaggtgtagaagaattacagcatcctagtgacacagaggcccatggagtggagttttgcaaggaggaaagtaatcctcagtttcaaatgcagttgagagggctgggagggcaactgcagagaacacttcctggattgagtaagtaagagagcaagaccaatgacagtggattggtgagaacagcagacttggggatgccctgagtaatccaatgagggaaaccaagacaggactgtaaccagagagagaaatggattgaaaggggagttagactttcatctgaaagacttggttatgtgtctggtagagaaaaaaagaaaagttaaaaatttaggagagagataataactgacagcatggtcttgaagaaggcaggaactgatggtttggtcttaagaaaagaagtgataccaccacatgcagggtaaagagggaaatactggatatggataaggctagggatggcttcaaggttgctttcttttcctttcccttcccttcccttcccttcccttcccttcccttcccttcccttcccttcccttcccttcccttccctcccctcccctcccctcccctcccctcccctcccctcccctcccctcccctcccctcccctcccctcccctccccttcccttcccttctagatggatttccgctcttgttgcctaggctggagtgcaatggctcgatcttgtctcaccgcaacctccgcttcccaggttcaagcgattctcctgcctcagcctcccaagtagctgggattacaggcatgtgccaccacgcctggctatttttttttttttaatagagatggggtttctccttgttggtcaggctggtcttgaattctcaacctcaggtgatccacctgcctctgcctcccaaagtgctgggattacaggtgtgagccaccacgcctggccgacttcaaggtttctaattaaatatatggcagagtttgcagctgagactgcgggtcagggtggtgagcttgattagaggggtggaagtttaagctagaatgaataagaaaagaaacccatcaaggaacatttaaaaaacaaagtttgttctctttgatcttggggaaagtaagtcatgtactccatttagtacaaataacaacccctaaccacattgtccatattgcagggtttcctaagttcacaccaatgaaccaatctctgtttatgaaatgcgctctgcctgtgcttgcattttacacacacacacacacacacacacacacacacaccactctacatctttgccaattcataaccaatcacctcaattatggagggtgatagtcttttctttctttaattaatgagtttccagtttagatgtgtgatctttacacagtactatttaatactgtgcagtttagattcaggtaataccacagtggcagttatttctagcagcaggtgtggttggttacttttatagacatatgctcactgtgatccagggactatgttggacacttgatacctatgttatcatattgaaaatccttacaaccatactgtaagctgactgatggggaaactgaaatgtattgatattaaggaatttgctcagggtcgcctggcttgttaaggtaaactttgaggttgcaggtgcgggtctgggaccttaaacatcatcatgtcacctagctacagcaagagccagcagaacaatactcttcagcctggttttgatatggaagatgctcttcagcttcatgctggcttgaatttcctttgcagtgaagggagaggagaaagtgcattttaataagcttcaattaaattaatttcattttacttcttttgatgtatggtctcttcaaaaaatccaattctactgatgtttattaagtgcctctacttacttggagagtgccaggcacttcaggggatctatggatgagtgtgattcagccctgcttcaagagctcacaatctagtggagaggatgggagtgtgcaatttgctctaatactagattgaatgtaataagtaccatcagaagtggcccaaactgtggttttttaattctgaaatgcaaggttatgtgactaattagaaaattggcttggcagtgcctaaacaccggaagcatcacacaatagaactcttataaagggtctttatttcaaacatgattatgcatttgttcaaatctatggcatacaatgagtgaagaatgtattgatggtggtgacatcatctgccaggctgtgaaggtcaacagtgccagcccaagttgtggcatagtgttgggtgatttaaaactcaggggcaagacagtaaactcacaacaatcccagtggtggtgcatgacctgcagctgttcttggttctttgtgtgttttggcaagcaacagctgttcaagacattgaactgcaattgcacaaaaatatatgttatgtgaagttgttggtttttcttcttttattactatagggtgcttttttgaagttaacttcggaaatattgtgaactcagaataggtcaagtcctatatattccagctaaacaattgtttaatacatttttaaggagatttaaaagtagggcagtagatactgccataaaattcttttccaggtttactgcaagcttttggaagaaagaaataggagctagagaacatgagctagtacaatgtaccatgtgcaaataggaatttaataaatgcttcccaattcttttttttaaattggtctcctaggtgtgttaggttctgtaatagtcacttccaaaatacacagctgaaaaaagcattgcttttgtcttctaaggttttatatctaaatagaaaggctggggaaatggtccactgacaggtcaaaagcaagatttctagtgtcatattattgggaacacacacgaagccagaaaatccatcatttcataacttttgtagcacttcacactattctaccaccacatagatgtttgcttccatatttgtctgaacatccttgcattttctttgccacactcccctgctgcaatcagtccatgcctccctgatggattggttgcagcagcatttggtgttgcttggatgaggtgatggatgcttctctctcttcttcagctacttggagccaaaatacaaaagtgctggttaaaaggtgattaatcttccctaatggttttgtgcattgcaaacaggactgcagccaccatgtcttcattagccttaatcagggcccacattacctcagatcaggtaatcggttatttattatagaacagcaggcaaaggccttttgagcaagtgtcaactgtataaagtctatttggaaaggaaaaatagtggggttccagttgccaagcatccatagggaaggaattaaagctggagtgtatttctgggcacctctcctgctaagcactttggttgatggagggcagcgggtggctttgaggtcatcaggatggacactcagtaacagccctttgccttttttttttttttttaacttcttttttgcttccagggtgacattatctgggtctagggactgaaacagtttgggaaatgttgtcttctgaaaatggaagatggatttttagtatctttgggggtttggtgtacttcttaaaatatgagtttagaacttgctgtatgcccagtaatattcagggtactggggatacagagatgagcacaacagaccaagctccaagcttttgaagcttacattgaatggaaaagacaggtaataagcaagtaaacacatgcaatagaataaaatattagcactttctgaaaaaaagcaaagcaggtaaggaaagaaagagtggggcagggactgatcagggaagtcttccctgaggaaaaaacatttgtgttgggattaagtgaagggaggtgtattagtccattctcacactgctataaagaaatacctgggactgggtactttaaaaagaaaagaggtttaattgactcacagttctgcattgctgggaaagcctcaggaaacttacaatcatggtggaaggtgaaggggaagaaaggcatcttcttcacaaggcgacaggaaggagaagtgccgagcaaaggggaaaggccccttagaaaaccatcagatctcaagagaactcactgtcacaagaacagcatggggtaactggccccatgattcagttacctcccatcaggttcctcccacaacacatggggattagggaactacaattcaaaatgagatttggatggggatgcagccaaaccattatcaggaggggtgcccagcattgtaagaagggccttctgtgcagagggaacagccagtgcagaattcattcttcaagtggctatgttccttttatttattttatattttgcacttcctaagaatcattccatggaatcaatccattccatcccttccataaagtacaagcaaagttaaacgagctgaagtaggtgaatcactagaacggtgtctggcatatcattcatgttcaaaaaaaatgtgagctgcttcctttcaatgtgcaactcaagaaaatgacttgccatccattcttacatacagagggtggctaccatttgccactgaaacaccatattctataacttcaggccatcaatgggaagcatcttccttttgcttccctctctcctttctctctttttttcttctcacctgtgtgctgaaacacaagtgcctcaaattcaggtttttaaataaataaaattcaataaaatcaaattcaggtttttaaataaataaaataaatgtaatctgcagatcacagagtgaacagctgatgactctgtgataacatcatatcacatccacatattccataccatgatccttaaagaatacatgcacacacagaacagtgggaacagctgaattaggtattaaagtggagtataaatagaaatgggtaagttttgtgggtagctgagaatttagagcatttaggagttcagaacatcattttagtgcaggaatgttggtctttcttgctaggatctgtagagacacatgataatgatggcctttcagggcttggtaaaacattgtaatctgtataatattgtgattatctccaaagctatccttaaaatgtttggggccctaacatcagtgttcaaaatcccaaaatattattctcatcagcaaaatattgctcctacacacaaggtacctcttctccttttttcacttgctaataataatagcaagtattaatataaggtatttgttgagcaattattaaatatgtcatctctaacacaacagtccaaaaagacaggcctaagttcttctactttatagatattgagactcatagaggcataaagtcctacagtataaatgagaagctgggatggccctggatgtgactgcctgtaaagccagttcttcactcatactatttgttatttttcaaaacattcaaccattctcttccctttgagagtttatcatttttctccctaagtcctggagaatctttcttggcaatgtcctgatattctattcattattttcctaccctagttctttcttttcatagtctttatcctttcaaatctagactgctgttcttttctgttggtcctccagactccaaataccttccagtatcagctagtcttatgcactgtgattggatagttaaatactactttgacacaaggctgccatcttactgttggaactctccactgttcttatagtaatcatcaggctctgaacactggcttcccagccctgtataatctcccccactttatttatccaaacttatttcagcagcatggctgaagtcactatccatggaactcactgcgtgtgttcccccgataccttgtctcaaactgtatgccctactaaaagggcctccaccttttctttacattctaaaaggtccagatcaatttttccctctaccgtgaaatttattttcccttctcctggcatattgatctttccctgtgaacactttctgtaaacttgaaaggtctataaaatggtcctttttatatagtctttcaatagaaacattttatcttacaaaagatgccccttactgaaaatggattattttctttggcgatgggtgactgttcagctgaaactaacagaaaacacaacaaatgttgacttaaccagttagaggttgaagacattaagtaagaaaaagttgagaagtatgctcgccagggtgaggcagctgtttaacgatgccatttgggagccactctcttctatctttctgtttcatcatccttgatgtatatgctttcagcctccagtttgttgcctcttagtcacagtatagttgctgcacctccaggcaagaggaatggaacagcagaagtccaggtatgtctcatcggtcagcattggtcagaattacataacatgttacccctagctgcaagggaagctaggaaattgagttttgagcttttaagcttgtatagagaaagtaggactggaaaaatgtgctcaagaactgatcttaagtaaataagcctatagtataaggcgcagcaaagcttaatgaatagatttttatattcatataatgctccattcttttatgatgggaaagatattagagtgaagaaaatggaatactggagtcagattcaattgttactgaatattggcactgtcctcttgtagtcttgagtaagtgactgttctttctgagacagatttcctcatctaaacatttggcttaataataacactgcctcttagagttactgtgatgattaaaagaggcgatgcctgcagcctatgatgtggcacatgtcaattctttttccctcttccatttgaggccctggtaggtgtggagaaaatcctaaaaacaataaaacaaaccaacaaacaaaccagaaaaattgaatcaatgaagacaatatctgccaccagctagtcccataaactcatttcaataaggaaaaaatatcaccccagtaacggaactgcaggagtgttttagatttatttatcttgtaattgagtggaaaggaaatctctgaatgtttgtgaaggtgttgacccatggatactaaggtatgtgaaaataactcacacatctcaggtgtttaatgaggatcaataacaatttgtgggcccatcagctctacagtcctatcacctcaaatcacacacaggaaccctgcttctgaaaagtggcacttgggagagagaatggcagagtgaaatccaattagcaagatctgcaaaagaggcacatgtgccagaatcatgcgtgatcccagaaaaaaaagtatatatatatataactattataattttatatatatatatatatatatatatatatatatatatatatatatatatatatatcatagcacattcttagcctacccacctcccactaccccaaaaagcaggacaacattttccatatattctattgaagttttttttttttttaaaacttgttggcacagaagcctatatctgtagatattttaaaaactttacttatatctatttgaaatgtgttaaaaagccatatattctttttttttcttttgataaaaggaaaagcaacaccctaccagatgttgggaggaatagtaagcaagtgattcaatcagatttctcctatggggacatagactctctcggtcaatgtcacagaatgaaatagtctcagattcacccagcagtgagttattccatctggttgtggcaattaggagctgaagatgacgggaagttaaatgactatctttatgaaacaaagcaaaatagaaaagggaacagctgggggactggatggcttggggatgcagaattggatctagaataaagaatctgttacttcgagttgctagttataatgccagtgcaggttaatacaaattgaaggttgctgctgtgtgctagcagttagctgtcgcttgcctgaaatatgaccataacatttacagtactgtctggattgaggtctctagaatgtaatgtcctttttacttaagggccaagccaccagattaactacatagacagggagtcattgaacttcagctctggaaaggatgttgttaccaagttcagtttgtgaattgccaggaatgttatgtgtcttttctttgcatgtgttatagtctaaaaagatgcatagcttttatcaaatccaaaggaaagaatgtgaatccaccagtccttttctaccctcttcccctcttcccccacaaaatgtgaagaacttgctttagaccttgtctttggagttgggtagtctagaacataagcttttggcttactgcttactagctgtgtggccttgggcaagttatttaatctctactagatttattttttctaatttatacaatggggatgataatattgtttatcctattccataatgttttatgaggaaaatttgaaataatatatgtaaatcgttttactgtaacatgtacgaaggatccaataaatattggctcttattattatgttgaggtatgctgaaagttagtggcagaaacaggaccagaacattgatacccaactcactactctggcctttggaaaacatggtgagcctatctctcttcttatttgtcacacccttcatgttttggcaggactcaagagctaacataaggtactgaaatcaaataattacttctaccattacagcgctaagtggtctacttctgcattttgagctctttttcagaattctttaaacatcttatctgcactgcagtctggaaagggaaatcacagagagaagggaaatcatactttggctttccaacaccctctacccaagttgcccaagacaaaactgtgagcaaggttaaacgtctgactcattagtaagaggaagtctttttaggcagttcctctgttgaatagataaagtggatcaaacaaaagagatgacagattagaaactgtctggtggctaatgtactgtttactgcagtataaatgactggtgtttgggaaatgacagatgagagagaatacaaatgtggacgtaaataatttccaggtttctacagtggaggagagtcatggttggttaggatgttgacagggaagggggaagtcattggttggagtttcagggaaatgagaagagcatggagaggacttttgaattaatccattgatccacgagttaccatagcctccgtgctgcatacagaaggtaccatgaaggggtatagttcttttgctcttttctcactgcctgatccattctaaatgtaactcttgttccagaccaagtgcagaaatctttacagagagaaagcattgggatggggatgaggctatgctcagccagtctgggagatctctaggggaaaatgtcataggaaaaaatagtgataaatatgcttaaaagaaggcaaggaagaaagcaaggaaggaagaaataaagaaaaagagagagaggaagaaagagagaatgaaaagaagggggttgggagggaggaaataaaagaaaaaagaatggaaaggaagaaaggaaagagagaggaaatatggtatatcagttattctgcatgatatgtttgagttgagtttgtggtggttacttgccccagggtatcaaaagaagtctccaattaatttgtagccagtgtaaccatatagcatctatttgcttagttttcaataataataatactggttctgattaaataaagcatattgtcaaacttattatttgcaaacatattactgttgtaactggtaattgctcagatctctttcggttcctgccccgacacccaaaagtcaagagggtggaaggtgaccctttctaagactttgacatggaaattctttattctgtttcaggaatggcaaattccagtttacagatggatggaaaagatttcttccttgtgataatagaatgcaggacagtatttctcaatagccatgccaatgacattttttgactggttaattctttgaggggattgtactatgcattataggatatttaacagcatccctagcctctacacagtagctgccagtagtagcctccccaacactaattgtcacaataaaaatatctccagatgttgccaaataccccttgtagaggcccaaaaatgccccttggagagggctataattgacatttttgaccggataattctttggggcaattgtatggtgcattatggtttgtttgtttgtttgtttatttatttatttataaaacagggactcatttttttcacccaggcctgagtgcattggcatgatctcagttcactgcaacctctgcctctgaggcttaattgatcctactgtcttagcccccccaagtagctgggactacaggcatgaccactgtgcccgtctaattttttttcttctttttttttttctttctttctttctttttttttttttgtagaaacagggtttcaccatgttgctcaagctggtcttgaactcctgagctcaagcgacccacctgcctcagcctcccaaagaatagaattgcaggtgtgagccaccacgcctggcccattatagaacatttagcagcattcttagcctctacatagtagatgccagtagtagcccccccaacataattgtcacaataaaaaaatctctaaacattgccaaatgtcttttggagagggccacaattgttcccagttgagaatcacttcttcaggatagactgttgttaaaccattgattcagattcccagggaaagactggacactcagcagccgagcatcctgctgacccccagaaccctgccttgacacctgctcacaaacccctcctctccaccctcaagggcaaggtgtaatttagctgcagccttttcccaaatgcctgtagcttctacaattcaatcttttttatttgtaagtatctttgcagttttctactttcaaaagactcttagtgatttctaatacctcaaattgtacaggtacatggctttttgtctctttctctgtgtctttttttttttttttttttttttagcttttcattgtagaggttcctactttttattttttctttccatgtttattgcttttgtgtctctgtcttcctgatttcattttggtgtggaaactgtctttctctgctattatcaatatcttactacctagatctcaatttcattttatggtttagccttttggtgtttatctccccagtcgctatcatccttttaatgactatttgtgtttctgggtcttttttcgtgtggcagcttgtcttttggactgcctctctctgtttgtatctttccagctattttttatagtctcctcctacttttggagaatagcgatatgttgttatgacatttctatttgtgactgcctttttcctctattgacttcccttcccctttctgcctttcttttgaaaatggcccatctggattaagtttctatcaagatctctttctataagcaggatttttctcaggtatgtaatggaaaccttttacttctgttgaatggtaatcctaaggggaggtcagggaatggacttttcagttaactgctcagaggcaattgtttgttttactttatataatcgaacttttataaaacttagaatattaaatccagcaaggttaaatatttagccttttgttaactttgtaaaataaaaatagaacttaaatgattcattataaagcaattatcttagaaaatgaataggtaacacattattagaatcaatttgttctcaaagctatgagaaataaaatcaataatttttagagatagataaagtgttttaggtaatgtttgggaataagaaactataagagtaggatttggctatttgcaaagtacctgacttttcccttggttcctaaagaatttcgaaacaaaatgagggcactataaggttcacaaggactgaaaactatttgatcttctcatttttggaagaaagtgagaatcgtaatatacttgcgaaacagattggattccatctggtgtagccaaattaatccttctttaatgattgtttatattgtgtatccaaaatcaaactcagtatcaagagttaattacaatttataatcattttggctcaacaaaacaagagggaattgtaaacagtaaagtttattttatagtataaacatgttaaaaacatggatcttcattggaccatatgtaaattaatcaaattatctccagtttttgttgttgttgtctgtttgtttaaacgtggtgcaggaaaaagcaatggctgctgagactgcagaggtttgtgaagaagtctgttaggttttctgaacattcctcccctccgaccaaaaaaataacccaaccggactaagacaaaaaactgagaaaaccaggatggaaatttgacagaggtgtaggaactaaacaaggaaagggaatgtttctcttctctctagtgcaggataaatttcatcagttccctgtctgaacctcattaaccttaataatacactatcaaaaagtcaactctatgcaattagtatttaaaggtacttgatattttaggtgggaaatttattttctctgaaaaatcacacatgcctccaacaacttgaagcttgctaaaatttatagcaataacattgaattcaattacattcaatcaaattccaggcatcaagtcgttattaaacatttacctctatggtcattgtgctatggttgggaataagaataatactaaggcaagatcttctcctttacaaagctctcagctgattaggaatctcataaattgtcaaatgtcactgtttcagctaacaatgtttctaccataaacagaactgactcaaaggggcaaaaagtaaataaagtacatgacatgggagcatactctcacctgagccttagagaggaaactgacatctgtcaattcacttgttctgttaattccactttgatatttcttaaatatatccactcactagggctaagccacaccataactgacttctaggcattcatctttcttccacttaaattcattctccaccttgcagctatttagttagttcttctagcaatacattggttaaaactagtcaatgacttttcatttctttcaggataaaatgcagtatagtatgcagtggtaggaaattaagcactagaatttgtgtttaaatcctaatttcctctcttatctatctctttgccctggagcaagtaattttactgctctatggttcagttattttatctgtgaaacagggataataacatcacttacttcatagggttactagtaggaaaaattagttaataccagttaagatgatttgtagagaaatggcaccttcaattaatgttaactgttactattgttgccacctctagacactcatcccttcgcactgcccttttctcatttttccctggattgttttgagtttcttagaacgtgtacatgctgttccctttgtccccatcactagactgactcctacttgactttcaggacttctgactttttcttcctccaggaatcatcttctaccactcctctgcatggcaggttagatgcccctcttaaatgcagggttaacctctatcgtacatttcacaccttgtatttacttgtttgcttccctattcttccttctacaatgcatacactttgagggcagaaactcagctctgtttgtctttgcagctctgtcacctggcacagtacctggttcattctctgcagaatgaggaaacctcaagcatccactgaagggaacagtgtagcatagctcatattaccaaatatctgcatgttagaggcttatgtgtttatgagtaggcaggtgtcttcatggaactctggtatcttccagatgttcataggtatatctggaacgatgagtatctggccaagtaatatatggaatcaggaatatgtctctcctaaagagttatattttgatcaacctcactcttactgcagtgggcaagcaggtacaacctagagttttccaaaccgttcagattatgaaacctgtcgttagtaatatattggaaaactcaattatagtgccctaaagagctataataagaaacacagtttggaaaatacaagtctgagttagtaaccaagatgtctttttttcctcttgattctaggattatttcaggaggttgtgagagacacaatgaggccttcagctctgggtagactagtttcagccggagctcttaatgggcatcaaccatcacaagttgaagccattcagggatgagaattcttttagctattagaacctgtctccatataaatatttctacctttctcctccagtggtattctctgagcagaggagatgggttgcatagtggccttaaaaggcacagccccaaatttcactggttatgtggacataatatgactttaggatttcttatcacccacttcaaaaaccccagggtcacttaattaaaatgactgattcctggagcctcaacatgtgccttctaaatcagacagtctatgaatgtgagactaaagccaaagtttgtactgagttctcctgtgactcttatgctccctcatgtttaagattctaccctgagtagaggccacttcaaaaatagaaactttttaatagttctctgtttacaaggtcaattctgttaagccataaaccatcccatttggaattagtactataattatggttcttatttcttacacacacacacacacacacacacacacaggttttttggaaaaaaaacatgttaagagaagacatttaaaagtttaaagaacttagatgttttattttgtgagaagaacaattttggggcaagtcgcttaactgtctgagccccgttgtaccatctgggaaataggaaaagtggcatctgcccttgctccgcacttgggatgggagagtcaaatgagaaagactgaaagcaggtgtaaaatctaaagtactaggaaaaacaaggtgttatgatgtcttgataaacatttggtaagataggagtcttgttacacataataacatttttctgagtaatctagtttggtttatttttctgtggggtttaagagtacattttgataactgagagtttaaaacaataatttcagatgtattaaaaattgtacgtgattattagaagtgacgaaaacttctgggattatataaaattgagttttatacaacattctctttgactctaacaagagttaaatgttaggaatcattgatgtaaactattcttaaatgattccacattccaagcaaatgctctggagaacaaataggagaatcatctgtgagattaactttttactgatgccatgtggagtaagattatcgaagcatcttacatttaagaattttacctcagacttaaatagcacgttaaataaaacaggcagaactaacaaatcctgatatcaactttaatttcaactttagctcttttacacttttataaggccctttcctcttataaatgtaaacctattttttaaatggaagctaatttgttaagtccattctatcagaggtaaattgaaaaatgccagcaggcaagataaatttgacagaaaataggtaaaatcaaagttttattcatgtacagtggttaagaatgaagatattaagataaattattttaagtgaggactgtccttttaataggcctcactctatagccttgtctcatttttcattttcacaaggttcttgatgtattcttttcattatataaaacgtgccatatttggtcttttcatgaaatgtatctgatattctcctttgacagccattcacgtgaaaagaaaaggtcctatttctgtccatcacctacatgcacatattcatagaaatcatagatttttggtaaaatatgctatatacttatacagcatcttaatctcagaaacccaaagggtttagatccataactgtaccatatttcctttctgtatgttgagagatacacatggtcaaatttcctaaaacctgaatctaactcaatctaaattatatgatttccgtttctacacagtggaacaagtgtgtgtgaaataaaatcaccagcccagaggcattcacccaaataaatcttggagattttctgcaacatttcatccctctacttctatatctaagtattgctacttctagttggatgtaaaatgcatccttctcaatttatttttgtttgtgggggatggatggaactaactgttcccccactactttataaacaaatataaaatgtggatgtgtaggtattttaaatgctaacagtagaattttagtatctagttaataaccctattggttggaatttaaatcttttcaggaggaaaaattaatcatccattatatcattcatcttgatgctgtcactttcttcttgaaatcagaaaaacatcgtagtttttacatggtagtttttccttgttggaggacagttgcattttactccacactgttaaatgcattaggccatgtaagagaaatataattctgtaattattcagaactcagttggttgtttatatggtattcagcaagatacttcccccccacctccaacttcttataacacaatttcaaagcaccaatcgtcttcctcttttaaagtaacaccatgactgattgccttaaatttatatatgatcttgttctaatgtcctttctaaaaataagaaaaaaatattccacaagtaaaacgagagtatgatagatacttcaccatggtgctggtgtatgtagacttgcgtgagggggaggacatggaatggtatgttctccattcatctctagttttatttcctagatgagttatgggtgaatactgtgacaaaaacaaaacaacaactaaaatggaaaagtcccaggagtgaacagaaaccaggacttaaactgcttcatcattattttattgtattgttttcgttttgggtttttttttttttttttttttttttttttttttaaggaagttacaacaaggagcagctaaggacagataaattggtagcagattgtggtttatgataacgacagtcccgaaggaacttggctttcttggtgacgttgaagtaaattgcattactcaagatgtatactaagaaggatagataatgaggtgtatgggggaaaggcatgatgactatttttatagtattgttgactaccaaaatgaatggaagggaaggcgggaccaggtggagttccttgggttaatttcgatgtaccttataaatgacaaaatttccacccacttctcttagagggataaaaatatttgaaagtgtctgaaacaattgccgaccactatttcaattccttttcctaacttctagtacctttgatttactctgaattcctaatttcttgttaaatgggaccatatttgtttataattcacctgggttaaaaataatgttttcttctgagaagaggaaagaggaagggagtgctctagcttcttcatccagaaacagactcttatgtaaaacccccaggagattctataagatatcagggaagattcacctaaagattaggaccctttgagcctgacaaatctcctgttgaatgccttgctttcaaccaaagctgagataaaaagtgcgcgcatgtgcacacatgctcaaatacacaggcagaaagctctcagctacaagacctgcttccgtagtttacagagcacctgtagcccatttcccctgtgttttttaggcaaatctttgttatcatggtgtatgacagccacatataatctgagtaccacttcctcccttcttaattttccaccatttatgccaattagaagcaaaataaaagggatgatttctggtcacttaaaatcggggtgaagcaaggatggaggttgtcctgcaaaggcattttaattctaaagaaaaaggagattagtggcctctacccatcttagagaatagagtgtcctgacaccttcccttcctccttgctcagtattctccctctccctagtgccacattgagaggagattcactcctaaaagagtgtgtcattttaagttgactttcttggagctgagctaagagccattgccaaggccagtgggcgtaaattcagtccgcctgacgggagatgaagggttgtgggatttatgacttatttgagttctcatatatcaccctctgtgtcgctcgcttatgatggccctgccaaaagataaagaagtgtaggacgctggtacgggctgtggtgacaggccagggacaaatgtctctgttgggtaaattgatttgaatgactctagtgaaatatcaggttaggctgaaaatatgattgggtttaatgatcctgctgactttgtagactgttgggattccaaatcctggacaagttaattaaggcattctatgaagggggtgtgtatgaatatttgtaaatccatgtaattattaatgtcaataaataccaccatgtaaaaactcagacctgttctttcacataatatattgaatgtccattgaatacagggaacattacttacaatttatagagtatttatctgggaaaaactgttgagaacgttattttttctccacatcccagagtcaacaagcagagaccgaaaggcataaaaatgtggaatgaaaagatagagaagagataagcagtttattctctcctggcaaaatttagtagccttacccttaatagtggagaagaaatttttatgtgaaattggggttgttttaggccactaacccaaagatcaaatggattgctttttcaattacaaaaacacatatattgttaccttattttttgaatgtggctattcagttaaaaataatagagtttagatttctttgtaggaccaaaattttttcagcaggtttctgtttttccacttaaaattgcttccaaatttctgagtttacttctaataatgggtatgctctccttgctatttttatctctaggtaattgttgactgcttgtagttttttcttgttgggcatgaatgactggcttcatcttccaaaagtgttacaaaacaccagttatttctttgagctttagacttttcctttgcagaaaggagccttatttacatccaaatgaattcccaggagagttttccactgatgccgactggttaacagaagtacaggcgagcaggaatccctcgctacctggcctttcgttccctggttccatctggatctctgggaaaattttccatctttatttgccataaagtatgatttatttatttcaacgagtggctaagagccctggaatgccatctttaatgagtgtagggaggatggtaaattgggtttagagaagaatattgttaaatatgttcaacttttagaacccaaacaaaaacacaaccagtgtcagtgtttgagagtgctgtactcatctgtgaacgtaacagagaggaaaggtgtctccgaaagaactcttcattcttaggagaggccccagaataatcacaaaacttggaactgtatctatggaatatagaggtttccttgtcttggagtggattcttagagtaaaacatgcctatatccttctgttcttttatcaacttcaactgactgtgaatgatgtactcactgagaaaaatccatttgctcaggtctaattttaggtaatttctctttctgtatgttaatggaacccataactgttttgcctactggtttccaactgaggattaatataacagtttccactcaacaattgtattgcttttttatcccccttatttccttttctttcttcatatgagaatattgagaataagagagattaggaaatttacactgcttctgagggacaaggcagcttttggacccaattatgcatgcctctgaaacacatgttctgcaccacaccattttttctgttatgtttgagagataaaaagttgtccgtctgtctacctctccaggctaatgtctcaccacattcaatcaaacttctccttccccaggccaggattcatgcagtccctacctgtaatgtgctttttcatattcttttttattttaaatagagacagggtcttgctctgttgcccaggctagagtgcggtggtgcagtcatacttcactttaatctcaaactagactcctgggctcaagcaatcctctcatttcggccttccaagtagctaggactataggtgcatgccaccatatctggctaaatatatattttgtgtgtgtactttttgtagagacaggatcttgctaggttgcccaggctggtctcaaactactgacctcaaatgatcttcctgcctcagcctcccaaagtgctatgattataggcctgagccatcttttcattatctttcttcagatctcaaattatttgtcactcactggaagtgtacagctaatctgaagtggccttccacagttcccatctcgctcattacctggataatttcctttatagcaatgaccacattttggtattgttttggatattggttaccttgttaaatgcctgtctgtcttatctcctccaaccaaaagtaaactctctaagatcaggaatcctgcctaagtttttggcctgcatatcatcagtgtcctgcatatagcaggcccaatagttgttctaaaaattaatgtatacctgaatgaataaaagctcttagagtgacagaaatgtaaacaaatacttctaacgctaagaaaagtttgttacatgttctaacaaagatttaaccaaaatgttgtggctacaaagaaaaagatgggtgaagaagaatggacaaacactaggggaacatgagaaagttcctggaagaatattgtcatatatgaattgagactggtgcatggtacaatttcatatataaagatagtggggaaagcattcttggaaaagtctcttgttgtgaggcattacccagagttctttgtcttaaaaccaagagaattaaggagcatggacagaaagggtgaggttggagtgaaagtttaataagtgaagaaagaaagctttccaccacagagaggggtcccggaagagggttgccatttttacagttgaatgcaaaagaaactgatgagggctgggtgtctcatgtgcataaggtgtgaatttctggtagctccaccttgtcctcctaatgcgcatgtgggctcttagcttgagttactccatattgctttgttccccttactgcacatgtgttgaggtggaatttttcattgcaggcatgtctgggcaagtcacctgtttagcctttcttatctgtgtggctgtgggcatgtcctagttaggcaagtcccattttccaagttcccttatctgtgcctgcaggctgttctttcctttgagagaattcagccaaggacccaccctaactgcctgcctgaccactttcttcctttctcctctctcataatgatgtaacagtaaaaatacctgagttcaaatcctgatttttccttttaatagctgttgactttgggctatgtgcttaaaaaacattttttgcagagctttctcaatacttggcacattattgtcactgtttctccctggatcttagttttttgggttgctaagtgagcataataatccatagttcagaaatttttgtgaaataatgtatgtcaaagagcatggtttttagcaggtactttcattcatagagatagtagctgagtttaggtgacccgttaaatttgggaaaggattatttaaagtcaaggagcagatccattatgacaccataattagaatggataaccacatccgcagaaagtgcgctgcactatgagtaaatgtaattttgttcgtaaagtgctgggcctagggttaggggagataagttcttaatatgtcttaatatagccttgggttctgggatatgctaaaaaattattcaactcattagtgtctcagtatccttgtgcttaaaattattattataaaaatacctgaatgtgaacttaacctcttcttgagagtttcagtaaggaaagtgaggctcacttctttctggaacattaaacttaagcaggaaggtgccacatgaagtattatatcataatggaagcaatgtaaaaagaagagtgagtcacttcatcaacttcacaatgcaaaggtgctaccataagtcataattctaatacaaagatttatataaataatgattctgggattagccagatctcctaatgttctagggtttgtcatcatgaattgtggtatcacttagtaagtacatacttaaagagaagaataggaggggagggaatgttagaagaatagtgaacaactaaaaaaatgtgagagatagcctggagagaaaagcaaaaggacaaggcaacacaggaaaaagcaaagtggagaaacagatatgcctagcaagaggaaaccaaagttagcccggtagggtattgttgcaaaaggaaagccggccttgtcatttatctaaccaaacattccactcctcagtgatggggtagctgctctttgaaagacaagcaactgtgatggggacctgtcagtcttccttacatgcagctggttctctaaatattccaacgattcctatcattttctgtaggagtacctgcaaaactggaaggctaggctgatggctttttctccattaagcagtaaacacgttaagcaagcttgagccaggttctggaggaggtcatcttgcaaggataaaaaacattgcatttattggatgaatacttaatgcacggtttgccttatccctaccttagagatgagaaaactgaggctaagactagctaagtaatttacccatgtttgcatggcttgctgatgatggatccggatttgaattccattttgtctgactccataaatcatactcatgctagtacactgccctggcctggatgggccattttacattgtgtttttcttttatagacattaatatgtgtaataaatagaatgggagtatgtattattaaatgttaattttgaaatataagattgttttcagatggaatatccttttcattctttatgatccttaatgctgatttgaaaattagaataggaaaggtatggcaagtgtgtatttgtgatgggagtagctaacactgctcactttaacagtaaagctctgccatctgggttattgcaaattcttgtaaattggtatggcctgtcctgctgtcctggaaagggagcaactagcacaagagaaaccaatcaaaatgcagcaaaaggattttttttttttggtaagattttgcttaattatcactgcagtagaatggctagccaaagtcagaaatcttttatttctgctcagtgagcagcccaataaagcttcagaacatacagcacaaacaaatgccatttcatttttctttacttcttaaaaaaagttaatcaggaatttgttagaataatcctgtgttaaatcaagcagccagacaatgaaataggaattaaagaaaatgaaagtggtgggaattatagaaatattaaattatttcaaaaaccctaccaagtgaattggttaataagcatgtacaatttattgccctatgggtcctctttttacaggcatctttatggttcatcagtttgctcccatctacaccacctgcctataattcttgacaaaagtctgttttagatactgaaagtatccactagatttgagaacaaagcaaccctgtagcgtgagcccagagtccagaaggatgtgggtggaggcggatcaggatccaagattttagcaaaagatggcttgcttaagtgaagcagtttgcactctgcctctttattcagttaggcctggtgtcccttccagcaagaaaagcaactggaggtcctgaaattgcacactcacccaatttccccaaattctttacttctgaggactattgaatcacagagatacagcagtagacttcatgaagttcatctagcacctaggatcttgggatctatggcccgggacagctcctgctgtacaggtcttgggtaggctgccatcctctaggtggtggcggcagtgtggcttgtggttctttttgagtgtacactggctgccttacttgcgagaatctagttctatcaagtgtcagttaaaggccgtttttgtctctgattgcataacagggtatgtttgagagagacatcgctgagagaaattcaaagctaccatgtgaagatcctttcctgaatatagtgtggctacctcagatcaggattctcaagcttggcagttttgacattttggactggattcttttttgatgtggggaaactacctgtgcactgaaggatgctttgcagcatctgaggatgacccactagatattagtagcacctttctcccatggtaacaaacaaaaatgtctccagacatttccacatgtcttctgtagggcaaaatcccactggctaaaagccagtgatggagtttgtactctttgaaataagaccactgactttttgtcttccacctaattacgctcagtaagataaggccttcttttgaggtagactttcaacatctatctctgattctttttgagaaaacacgttgcattttaatcttttagtgaccgattgtccccaaatgtaaaatagaaagttgagggaggcagtagttatatgcacatattttttgagccagagttccctgagtttgagttaaggtgtcctgagttttgagttaaagttccctgagtttgctaccaattagctatgaaacctgggccgagttaaaagttagacctttacagtcttaagtctccctttttcatgtgtaagacaagggagaataatgattgtacctttttcataggttttgatgatggttaaatgagttgaagtagtgaaagctcatagcacaatggctggcccatgttgaatgcctaatgaatgtttgctataattactactgttgatgataatacttttgaaaacatagttgacttgttataattaagccagtgtttacatctgctttaccaaatacttcccatggtttttatctcagaaaatagactcaaaagtgaacacacacacacacacacacacacatatataccacacatatgtacaacctgcatcgtctaataagctcagtggttccatatactatatctttggccaaatccggggctttctgattagcacctctagttttttttttttttttcttcccactcctgctataaccattctcagcattttcttccagttttttccttctagaactactgccaggtgaactacaaattattttcttgatttgcagcccatgcaccaatgagaaaatgcctatggtgtcttttgattttatggttcattgcttaggccttgtcataaaaaccatggcgtctcttaaaagaaaatataaaacaaaaacaactttctcttggccagagtttatcaaacctatgcccataatggcatagaaatataggaaatgagacaatcctactcccccaatccccgttttctgtttatttgtttgattcctgccaaagcaaagtgaccttgagggggcaccggctcagtgtttgctttttctggcgctacccacacccctccttcttcatctcctactgctccccattcagctcctcaacaatcggcaatcactctgcccttctgctccaaatttatgaccgggagcaagccataaacagagaaggccaatcctgatcctaggcactgcaccttcctgtttgccagaggtatgacagcttgatgggactgtaaagaataagcctgcatccccacaagccgcatgaatcatgtcctaggataatgactagcaaaggctgctgcagagactgcaggtgactcagagccctgaggcagggctttccctaaaccacctagaacaaagggttcccatggatgttctctctgtggcgtcatctcacaaatgagaagacctcacccactctctgatctataaaagcagcctttttattctgtgatccatgtgaaatggcaaagatcactccagcttattgatgctcagagaattatgaaggtgccacctgaatgatactcctataggaaatatttggtgaacaagataacgttttttcatggatactatttgcctcctccagttgccgcttggtgtgtatattattcgccagtgattgataatgcctcgggaccacctagtgatcttgttcagtttctaatttagttgatctgaggtggggcctgagaatttgcatattttaaaaactcccaagtgatgctgatgcaaaacagctagaagagaataataattcaaataaatgttcctggtgtaaaggaaagataaatatttcaggtgatggatatcctaattaccctgatgtgattgtatgaatgtatcaaattattccaggtaccctgaaaatatgtatatctaatgggtaccaaaaacaataaataaataataaaaatctgctttcaccaactgatctaggtttaagcaatggagtaacatgacaccagtataacaccttttgcatttctgaaagcttccttcccctcctctttcccctcccctcctctcctttcctttccttctagatctgacagtagtagctgcagcttatgctttagatttgagatacacagttgggatctatgatggtccctgagaaaggacaatgagtagaagaagcaaggtgcagagaggatctaacaatttttgcatggacatgagatttggagcaaggtctagaagctcatatcagcaaggagtaagtatgcttgtggcttaaagattatggtcttcaagacttgctcctggactggaaatattcccctaattttttgcctaaatgaaatgtgctacaggcctgagtatacctaaatcagcttcatttttctgtcaaatccctccctgtatgcttcttccagtgatatgtcatgcagatgtccacaggggacataggatcttgtagtgcaaaaaacatgagactttcatcagacaatcagtcttgactctcagactcactgttgattctatgacctagctcaagctacttaactctctaaggttaaatatcctcctctataaaaacctgatagtatgtactaaagagggtatttttgaaaattacatgagataaaacagcctagaatgctatctgatgcaatagtcatccagtaaattttaatatcattctactttgaaccaggttgtttatattaaatttaacagaattaagcaacatacagtagcgatttattctgtgggctctggagtctgcctgtaagggtttgagctctagctcagcgacttctttactgtgtgaacattgatatgtttactttaatctctctaggccttagttttctggattttgaggcttaaatgagttattacttgtaaaacacttaggagagtctctgctatgtaataagtgttcccaatatatagattttatttcatctagttgaatttagagagtagcaagccactcccttcccgccccacccccgaaaaaaaaaaaaaacacaccaccaccaacaacccacttttagtgtggcaccatatctaagaaggtattctccaagacttctttatgtgaagtagttcagccttggcagagttaaaagttttcagttataatcttgacaaaaattaattgggatgtatcatcaatctagacaatagctaaaattataaagcttctaggagaaaacatgggaaaatatctttgaaagtgtgaaataggcaacaatattttagaatacaaaagcactaagtatataaaagaaagtatcaatagattcaacttaatgaaaacaaaaattcagctcatcaaaatatatacctaagaaaattaaagggtaaattttaaaatttttgttccccagacatagactgggagaaaatattttcaggatatatatctaaaaaaggacctgtattcacaacatatgaggatctcctgcaaatcaaaaataaacacaaacaataaaaataggcactttataaaaaagatacgtgaatggtcaatagtcccatgcaaagatattccacatctttagtaatcaagaaattgtatattaaaatcacagtgatgtatcattttataccaactaaaatagttaaaatttaaaagacggacaacaccaaatattggtgagcattagaactactgaaattgtcatactttgcacatgggaatgtaagatgataaaaccactttggaaaaattgcagtttttaatatagttaaacataaatctaaactaagacttcgtaagtttacttttacatatttatccaaaagaaatggaaacatatatacacaatgacataaaaatgttcacattagctctttaatagtctcaaaatgaaaacaagacaggtatccatcaagagtatggataaacaaaacacagtatattcctatgatggaatactaatattcaataaaaataataaactacaagtaaatgcaacaacatgtatgcatctcaaatacagtatatttttgtggagagaaagacaccaaagagtacatactatataatttcatttatatgaagttcaaaactaggcaaaattaacctgtgttattacagaaaacaatactaattgcctatgagtattggcaggaaggggcatgagagagctttgtgggatggcagaaatgctctacattctgatgggagtgttggtttcaggggtacattgatttgttaaaactcatccagttgtatataggcattccttggagatattacaagtttggctccagaccccataataaagaaaatatctcaataaattgattgacaccgattggcacacagctttatttcccagtgcatataaaagttatgttgacactattctgtagtcttttaagtgtgcaatagcattaagtctaaaaaagcaacatgcacaccttaatttaaaagtactttattgctaaaaaatgcgaatgattatctgaggcttcagtgagtctttttttttttttattttttgctggtggagggagggtcttgcttggatgttcacagctgctgactgatcagggtggtggctgctgaaggttggggtggctatggcaatttcttaaaataggccgggcgcggtggctcacgcctggaatcccagcactttgggaggccgagacgggcggatcacgaggtcaggagatcgagaccatcctggctaacacggtgaaaccccgtctctactaaaaatacaaaaattagccgggcatggtggcgcgtgcctgtagtcccagctacacaggaggctgaggcaggagaatggcgtgaacccgggaggcggagcttgcagtgagtcgagatcgcgccactgcactccagcctgggcgacagagcgaaactccgtctcaaaaaaaaaaaaaaaaaaaaaaaaaaaaaaaaaaaaaaaaaaaaaaaaaaaataataataataataataataatatgatggggtgtgctgcattgactgattcttctgtttacaaagaaagatttatctgtactatgtgatgctgtttgatagcattttacccaaagcaaaattttcaaaattggagctaatcctgttaagcccagcagctgcttcatcaactaactttatataatattctaaattatttgttgttatttctagaatgttcacagaatcttcaccaggaataaattccatctcaagaaaccactttctttgcttatcatacgaagcaactcctcattcattcatgttgtatcatgagattacagtaattcagtcacattttctcctgtacttctgttctagttctcttgctatttccaccacatctgcagttacttcctatgccaaagtcttgaaccccataaagccatctacgggggttgacatcaacttcttccaaactcccgtgaatgttgatattctgaccttctcccatgtatcatgaatgctcttaatggcatttaaaatgatgaatccttttcagaaggtttttaatttactttgcccatatccaacagaggaatcactacctatattagctatagccttacaaaatgtatttcttcaataagacttgaaaggtgaaattactcctcgatcccttcaatttgtaaaaaatacaatatatataaagcacgatgaaatgaagtgcaataagatgagatatacctatacctaaaatcatgggctccactctgtataaattgtaccacaatttaaaaatgtatatcatatatatatttaaatattataataaaactaattttgaattattcttgattctaggcagtctctctgcaggagtctcactctgtttgttagactcttttcttccaccagaatttctgtcctgcagctcaccattatctagaaaactgagaaacaggaatatcataacagtaaacaaaagtcacttagttgattacatgcatctctcaaaagcctgtaccttctgctatgattagattattccagaagcctcttctggaggaatctcttacatttgcccttcatctatgggattctgcactttcgcctttctgtttctgtgttgtcctgagatatctcatgtagaaatgaattgatggccctttatactgcggttggactcttcattcagattttttcaaagcacattataaactctaattcattaacgtcatcataaatggtaatgtcctgtgaaaaagagaggtggtggcaccaattaaaataatcttcttgtagtcacacatcaaatcaatgtcagtgcaaacacttgaaccaccagttaatgcagccccatttctttttatattgacaacagcacagtggttgaagctgaaatagaacctcagttcatacttatagaatatgccatgctgcacttaacacatggatctacagggagaaggaaacagaagtgaacatggactagatgagaatctgatggacgatatgtaccacgtgctttgaaatagccataaggatgtctgcacaagaatatccatgcattcgttcttagaatttcagggccggttgtagctcagtcattttgccattgacttaattgaaatccaaatcaatgcagacacttgctcaaggtcacatagcttgttctctcccagctcccctgactgccggcctcaagcccctgcctccacagactgtgggctacagattccccaagagatttccttattccctggattctcctaagtttgcataacagaagtacttaaatgcatcacttcatttgggtatgggattttaaataaataatatgatacaaattctctcacactgcagagagtctaataatagcttacagtaatagaatgaacactctgtgcccagaactcctttgaatattttacataacattaacttaatcttcacaatatcctatgaggggatactattgttatcctcattttattgctgtggatgctgacacatagggaggtttaaaaccctgccccacataatgcagtttgctagtgatagagccagaatcagaatgttgaaggttggttctagcagccacacagtaattgctctgacctatctcctttctacaggaaatggggtagaggagattcgtttcctctgaaaaaaaaatagctaaaacctcaatgatgaaaacctatgagtgactaatgagtatgacagctaatactaaatggacaattgtcactgtgctaagtggtttatttcatttgaattatcacaactcaacaaaaaaaagttattttcatctttctcttatacataaagaaactgaggcaggcggtgttaaaggaacatgcctttagccgcacaggtggaaaagagcatgaacccagacaggctggctccagggactgcggcaatgttgtaataaaatggcatttgttcagtccagttttaattgatgagatactaaacagagtcggcactaaagaaaatttccttggagaaacatttatgcttagctatttcagagctggaaagtccctttggtttgatataaacggccttcatttttatggagctggcatcaaactgattttagaaagaactggcctttctccaagttagccctggtcagaggaacctaacacatttctcagtttaaactagtaattctcaaggaagggcaaggtttggagagagagcagtgcaccgctaagggaggtatcagtacctggaagaggggaagcaaatacatgttctgaaaacaaaacattgctggaagacggatatcgaacttgacctaagattttcttttccatctcccctggctaagatgaacaagtttgcattgggcaagtagagtcagcatttacactggtatcttgtgcttggagtgaaaagcaaaatgaaacaaaaagaggtttctttttctaaaattgttttggttttgatttgcgtttagtcataattcttaatttatgtaatttttaacatttcataagacagcatgaggattttgtttttgaggaacatccattttaagtttgaagaaaatccatttaaatgcagttgggcagagctgccacatgcctatcccatccctgttctgatggtggccctaagacgtttcgaagagcttggattctacttatccaaaactaattctgtacatttacgggatcatcagaatcatgaaaaatgtttctagggattctaggtttttagtagagagagaaaatgatttctaggataaaattcagataagccttgagctaggaaactcatagttcatgttgttacaaagaactaaagctgatttttcagagtaccagcttctcagaggacctgagacttgcggatctcatttacagattccaaaacccctcgcagttacactggactgatttttggcttggaaagagcagtgggatacatcctgcactagcccttgtcctgatggattgagacacaaagcttggcctgagcctctgtgtcaccagtgttagagatgatctttgtttctcctgcagggagctttctcactgccaaatggcgtggggctttcctagctttaagatgaaacaaagagaatgcattctcccatagtcttgtctcatagactcccatctcatgaggaattatctcaagtaagtatcactttctaaacaggttgcaaaaatccattagacaggtaggattcacctcgcctgcccattagggatcagaggctgcctgctgagagcccatatctgcagtgttttctgggtttccttttttgcaatggctctcataccctgatgtcacttgtttggtgtgcatgattgtgcttagccaaaaagaatgtgcagtagtcacttggcctttaagtagcaggtagtgaaagacagcagggagagtgtaacgaatcttattctttcagaaaatactaagattattttatttcatgtttcactctcatcaactatttaattacattcattcattcattgatttaaaactcatcatgttgccactatttgcctgttctatgctagcactggagatctatggatgaagaagacaaacaaggatgctattctcatgtgcattacatttaattgtggataggaaattaaagcaactaaactcactgagaatcagagctaacatttgcccagcacttagtacatggcaggtgcagttttacagcttgatgtatgttaactcatttaattcttctaataagcctataaggcataagctattatctgcttttagagataagaaaatgaaggactagagactttagttaactttcctagggtcacacaggtaggaagtgacagagctgggatttgatccagggctccctggctccaaagctcttgcttttagccatgatactataatgcattgaataatgggcgatatctacctttccttgatggtcaggaagaaaggtcaaaagaaaggttgttagagctaaaatctgaaagaggagaaaagtttttcagataaagagagtgtgcgtgtgtattttgtatgtgagtattgtgcgtgttctatgtgtgctgtatgccgtgtgtgtgtgttgtgtgtgtgtgtattgtgttgggatagagcagcaacacaacagtgtccctagcggaagaagtaatgtctgtgatggtaagggaaaagagggtgaaagtgagaaaagagtgagagagaggctcggacaacttaaacaactggaaggccagcaggataatggttatggtagaggtggagagaaatatgaagttggaatgggatgggatcagggacacatcatgccaagtcttctatgccacattgggaatggaaagtcatgaaaagattttaagctggagagttacctaatttatcatagattttaaaaagattcctcttgcagctgggtcttaagaattagtggctcttcattgatgagttcatgtcctttgtagtgacatggatgaagctggaaaccatcattctcagcaaactatcgcaaggacaaaaaaccaaacaccgcatgttctcactcataggtaggaattgaacaatgaaaacacatggacacaggaaggggaacatcacacaccggggcctgttgtggggtggggggaggggagagggatagcattaggagatatatctaatgttaaatgatgagttaatgggtgcagcacaccaacatgccacatgtatacatatgtaagaaacctgcacgttatgcacatgtaccctaaaacttaaagtatataaaagaaaaaaagaattagtggctcttgcagttgttcaggcaagagatgaaggaggcttgcccttggatgaatggcaagattctgtgtgtggtatgaaagtctagagcttccttgatgaccatctcctaccccatgcatttacagctttctctccttagaaaaggatttttgacataagcaaaaacttttcacaaaaatttgtgtgaaatcttatttggggatttgctctctgtgcaaggagtcctactccagcaggtttcccagtcaaaatatgcctttgggaatgcagagaactgaaggccctggctgagcaaaccccagctggagagacagactggggattctatctgtgtatagcatgaagaatttattctaaacacttggatatagagccaatgccacttacaagctttcctttaagaatcctaggccagttgttaacagtttttaatctccttaatttctttatccatagatacctgacaggaacagtttggactgtggaaagacaataatggtccctttctgaaacagtctcctacttgctgaaggctactggaatagaagagaaaatatagtattttctgaaaatgtaaacagatgttagtttaccatttgtgagctgcagggttcagttaaagtggatgttgtatgtaaatacagtggtagcttgggagctgcagatgtctctaataagcattcccaagtgcactgtgttccattagtatgtgggattccactaccctaatcccactactgtggcttactctgggctccttctgtttctattcctgcaggacacataaagacaccttaggcgttagctgtctctatgtttccattccaccaaatcggaacttcatgactttttcaccttctctctcagtcataagaagacggctttttaaaggatgccaagacaggtggatcatggtaatagtatactccattatagcagttgttattcattgaacacctactgtttgtcaggattgggcaagtggcagtatacatcatcttatttagtctgcacagcaggtttaaagggagataatattactccgactgtacaggtgaataaatggaagttaaaataatctcggcttggtagtgatggaatcaaatgatgtaattgcctcattgtgaccagctaagggcaattctgttaggatctgtgtaacacattttaagagaaacattggcaaatgaagaaaggttagaggaaaacatctaaggtcatttaagtatacctatatacatttctctcatatgatatgacaggcttgaaaaattacacagctcattacgagcaagagagcagtatatatatattaacattctaatcttaataggaaaaactaaaggatgctgtgggaataaatggaaggatcatcatacctagccaagaaaatgataacttaggtcctggataaataaattttaagtagggaaaggtgggctggagttaggagcattctaaactcaatgaacaacatgcacatgcacttggagacagtgcaggtcaatttaggagctcacaggccatttagagtgacagaagcagagtgtgcaggtcaggcagtaataagacatgaggctggagaaatgagtaggaagcagatcaaaggccttgaaatgtcaagaactttgtaccttatgggtactgaagaagtgaaatgtttaaagaagccgaattatatgatttcttttgacttcaaaatggaaaatacatgtcgatattgggggagaaattaggaggttcttgccataatacaggtggcaaatgatggtagtcttcaggtaatggcagtaggaatgcatagaagaacacagatatgaaagattcttagtctggcagacacctggaagcaagggtgcataggaatagctaacagttaaaaaagtatttggagagctatcatgtgaaacagagagatgatttattttttctgttcatttactgagggcatagtaaggactaattggagaaagtcatagggaaacatattttaatttcaataaaatctgatgctccaaaaattgaaaacataacttaccattcatctctgaatgtatccgtgcattttttttttcattcaagttacatttttaaatgatgtgcaagttctatagactgggtaacagtgtacataacacttaacaactaactaaaatcagtgaaacacatatcaatataaacaaagagctatggaaattaatcctgtccggggttcagaggagttattaattaagatggtaaaactagctgaagggataattagagggaagagttgtgtggggtctgcaggatctacaagtggaattgcccacagaacctttagatcttatgaatctagagcttagaaaatagtcagggctggtgaagtatactggggaattttcagtgtaagcaaagaccatcaaagcaaatgtctctgaagaataagcaagtaatacaaataagtgagatggacaaggcataaggcaataagtactgggactatggaaaattggcaagcaggtgccccttccaaatggcaccactgccagtcagctccagtaaattgttgctctgtgctctcagatctccacagtttctaaataaaaacaaaacattggatatttatgtgatgcttctagttaatatgatatctcacagcatgtccttgatctaactatagcccaaaggctgtcagattgccttgtatgttataagatgattgttgaagctgtgagtaagactgaaattttctcaagcgagtagaccactggaatgtatacatgggtaatctttctcaagtgggtaaccaaatgttatttggtatgtaaacttttctatttccacatctgaggattcatgctgctataagtgatgtctgagaaagtcatgcagcacattagccagcaaggcataaaaggcaaagagagagataagaaagatgatgttaatctagagcctaatgaaaatgtgggagttcataaggagtgatcaaatacgtaaggtgataattgtggatatgtttcgatatcagaaaacattgcttttctgtgtgatagtgctttctttataattaatgtggatttagtgtgtgttatttttagccttttaatccctataaatgtgccacttcatattctacgactgaaaatggcactataaacaaaatggtttaggaaccagtgtagagagcaggagccaaagatggaatccagagtcacagcatgagggatgagtaaggaagatgactaaactggtagattttagaatgagctatagcagtatcaccaaaaccaagagtggagagaacttcaagaggaaagacacatttggaccttttaggtaactgaaaaatggcaagtccattgggtttaaaaggtaaaggcttctggtgacctctgagagggcactctaaggggagagttggcaagaatccagtttgcactgcactgggcagtgaacgggaggtcagtgagtggagtgattgccaactgctccttgggcaagtttggcaggaaagggaaggagagatgtggtgccattccaaggatgagacgaggttaaaaaaaaggctttactcattttttttctagtggagtagaatttataatatattaagactaggagtgataattgatgaagcaaggtacggaatgaggcataaaatggagagatcagagttagagcaattgataattatttttctttcagacaggttaaaaatatgaatctttggatgtaaccgagaggaaaattgagggagcttatgcctgatgcctctacattttctctaaagtaggagatgcgggaaggggtcagtagagagttgtgggctggaaaaaaaaagtttggaggagctgctgtagggaatttaacaggggtgattaaaaggattgctgaggttcaaactgaggttggaaaccattaagcagcaatgatcagtacagttgtgagcatttctccaacagtatcaggaagtccaggaacaggaaggggaaaaaagagggtctgtgttgctccaggtttttagaataacaaaccaaattcagcagaagatcaaagtgaaacagacaagcagtatgtaagtggagaaatagacaatggaacacaggcttgagaaggacataaaaggagtcaggagaagactgattttctgagagcaaagagaatccctgagatatatatatatatttttaatattagaatgagagattcttgcactgggtaggactttgacctgagtgaactttgaggttcctcctaattccaagattctttgattctagacatgagaaaacaaagctagtccctatgctgttgtcataactgtcatggtatgtgatatggtttaactctgtgtccccacccaaatctcatctcaaattgaaattcctacatgtcaagggagggacctgtagtccgcaagtgttgagggagggaggtgatcggatcatgagggcggttctctccatgctgttctcatgatagtgagttctcaggagatctgatggttttatgaacgtgtggcatttcccctgcttacacttctctctcctgctaccatgtgagaaggtccaagattgctttccattcaccttacgccgtgattgtaactttcctgaggcttccccagccatgtggatctgtgagtcaattaaacctttttcttttataaattacccagtttcaggtagtatcttcatagcagtgtgaaaatgaactaatacagtatgtaaaaatggaagtcctgtatatacctgtctctctcaggattggcctcaaggaaccttaccaagtagatgacatttctcacttgttcctctcacttgttcctctcacttcctgttgtagtatcatcttctatttattctccttatcaccagcagatcaaaacaatgagggcattgatctatcataagaaggctgccttcaggccctattctttttttttttttttttttttttttgagatggagtctcactctgtcgcccaggctggagtacagtggcaccatctcggctcactgcaagctccgcctcccgggttcatgccattctcctgcctcagcctcccaagtagctgagactacaggcgcccgccaccacacccagctaattttttgtatttttagtagagacggggtttcaccgtgttagccaggatggtctcgatctcctgacctcgtgatcccccagccttgacctcccaaagtgctgggattacaggcatgagccaccgcgcctggcctcaggccctattctaataaaacttccaggtagatgcttgttctccttctctgtgagtccaaacaaggtctctagttattgattctcatgttattgcagcttctacaaatttcaccctcaagtcagctttttggcttttctgactcaagtcacaagataaccatccttttgtttcatttttgtaaattctcataaccccaactggatggtagatgaatatgaggaagaggggaaatcaaaagaatgagagcaatgagcctattactcttgagatgaacagagggagagattcaacaccaaatgcgtccctcttctgaatcccatctctcgaatcagacagcacttctgtgtacttcccaatatccatacaaataccaggaaacttattttacttgcctctggccttggtttgcaggtttggggaaacacaggagtcaaacagaatttttttgggtgaacccacagatttcactctgaggaacagctcccttgctgttgagacagctgggtgcactaagcaacacatttgaaatatgcctcagactttgtggaaccaggtagtctgaaatcttgccaggactttagtgcctcttgggatacttctgaggtagggcaaagtcccattcaatgttctgttggaggagagaatctttagtgaaatctcaagaatgaaagccaagaagccttaagataagagcgagagattcaacagcaagtactatctgtaagaactttgatttcattgcatttaagcttcttttcctagtggactgtttttagttgaatacttcttgaggataagtgttgtgtcttctatacttatatctgcagcttagcacagttcctgccctatggtacatgttccttatatgtacatggaaattagccaaatgtcaggatgccactttttcatctccatctctattcctatgatggatgactggtaaatacttctctgactatgtatgtgtagttcaaatactctagtttttttttagcataaagtgctgtgaaatcccaccatcaaaagagccaaagtaatatgatgaaaagaatttggtttcagaattaaaaagaaagcacacatttttgagttctcgctcaaaaacaattttgtgagggtaagttatttaacttctccgtgtctcagcttcctataaaactagaattatgagatctctcttataggtttgaaataggatgaaaattcctccctctttttttttcttataacctctctcaaaaccttgcctgtgtctctatgagtgtgttgtgttacagttactgctataatttctctactagattagggtggagaagttcccatggctgttcgctctctcagaggaccctgggcaaagttggtgctcactgtgcatcactgattatatcaaatactgtgtggcatgctcaggccttgttggtctctctgtaccagtgtctatcgtgggacataataattcatgatgaacagtcaggcatctacttagtggcttatacgtagaagtggctctcctttcagaagccagaaattaataaatggtctacagtcagaaggagatccttaattgattaattaattcaataagaatttattaagtaccttctatgtgctaaacactggggagacaacagtgcataaagagatcccatctttgttcatatgaaactatattctagaggaagagacacacactaattgaatactctcacaagcaaaagtacttttgtaatggtaattcatgctacaaagctgtagaccttggtgctatctgatacagagatctgatggaatcagaaagttcaggaagagatcgtctgagagttcctggctagagataggaaggaggggcagagttaaccaggaaggggaggcaaaagtatcacagtcacagagaacagtgtgcaaagcacccatggcaagggggaatgtgataagggtgtgtagtgaatgaagccatagtgactggaatataggggacaagattgaaagtaaaacttacaaggacgaccattgcttgggagtttgggttttattagcactgcagtggaatgctgtgaaacaatgaactggcattgtagaagctggcatagcctgcttttttgaggacatccaacacccatgacaaggtctacggcatcaaggattaccttggtttgtctttgctaaccaaactgggttatacacaagttacgagttgtccttgtcccaactcacaccctcaccattggagaagaatgtggagtgcccctccccatcccggcccatcccttatgtcggtggactaacgcagcatgcctaatgccagagtgggcagaaagaataatagctgttgtttcagtttacctgtactaatttatcacaccttacccagagactccagctccactttctgagttttctctgtctggaggtgaaacacacaagcacataaataagtaggaagctgttaggaaatcctctttgtcactactgaagcatgttcatttatttagtaaaacgtccataatttttaaattgctttatttagccactggctatttggtatcttcaaggggtccccattaggagctgtacttccccattacctgcaaaaacaaggcaggcttttgatccctggaattaattacatgcaaagattttcattgcttggagcagcaagcagctggttcctacgggacccaggctgaactctcttgccaatttccctctcatgcttgtccctccctccacacctacaccctttctttctttcattatgctcaatgggttcaatctaatgagggaaattgtaattaaacatttacaaggttccagttttctctatgactgcccttaagactgtgaacattcacagttcactctttttccaaatacagcacaatggcaaagtttccaggaatgtccttactgactcaggccccccagaatggtattaatccatttgaaaacaacttcacttgagttattagagctggggcaaaagcagggagggagagatctactcgttagggatgagggagcaagagcaatgatgactagcttttgtcaggacacaaagtgcgtctctggtgcttgtgcagatcagttgacaatggtttatagcttttctaccttcctccctttcctattaattattcatacttctcctaccaagagaggggtcttgttttccttttaggtgtaattagagtaatcaaagggtttgtaacactcatgtgttttatttctcattctctattcaattttgtttttcatgcaagagaaaaatataaaacacgaaacaaaaaccccaagtctctgggtgttgtgaattcttgcagggaaaattggttttaccatattagcaattggcagcaataattctgaggtgaaaaacctgaaattactcccttaaaggcagtaatttgtatagtatgtattttgagaaagggggggaggagtaggtgataatttaggtgaatgttagcagtttatctttatattttgtgataaacgaggaagccaagtgttggtgtgttcaactgtggacatacatttgcatatggttttgtttctattgaatagattttggtttgaatgacaaattaaactcccagcttccaaacactgaattcttttgttcagactttacacattcttgaaaggaaaggtgcccacatgcacttatcctttaagggtgaggttaggcaagcaaggaattgacagttattttatgtttttttgttttttgtttttgtttttgagatggagtctcgctcttattgcccaggctggagtccaatggcatgatcttggctcactgcaacctctgcctcccgggttcaagctcttcttttgtctcagcttcctgagtagctgggattacaggtgcataccaccatgcccggctaatttttgtatttttagtagagatgaggtttcatcatgttggtcaggctggtctcgaactcctgacctcaggtgatgtacctgccttggcctcccaaagtgctgtattttaccttttatattaacaaaaccttcttcttgcagttcagaacccataggaaatattattggaaaggtatttcaccacatcatcacaggcatttctatggtgacgaagcgatgtgccatgaacaaagttatgccattttttaatacaagccgaggaaagagaaaaaaaccaggagcaagccactgcttcagggattggcaacctctttatgtttgctcaagatagagcgaaaaactcctaaggttttaccattaaagaaccaaataaaattgtttaacatgttggaattgtgggtcctttttgtatattgacttgagaaaaaataaaaatattgatacagaaaaaagagaatgcatatgatctttttatcttagccaatatattatgttttcttgtttttgtatatctacatattcataaaaacaagtatgtgtgaagaagtttacatcacagtgcaagtgtgatccttcatataaaactaaagcaagtgaggatgaattcctaaataattaaacggtaaattacttgtgtttgtatcagctcttgagccatcttaaactactaatcaatttctcataatcatcagtgcttttcatctgtgagcggattatttggtcaaacatggagacaatggcacagccgtgagtagagcccaggtgtttttctccgatttctccacagaactacaatgccagcagaaaggtagagtggagtaataataaaaaccaggtttaagagaacactaagtttttttttcagtgttgttcacggaactgcaagtggtatagaggttcaggaagtcattacagtcttcataggggtgcaatagttctcacttctcctttcaagaagagttgtaatggaaagttgaggaagaacagtagggacacagggacaggtggtgtctccaattggtcatattctccaagttatttttggtctatagttggttccctaaatctcacttcttctcttcctctagctttagggactggactcagcattttggtttcatttcttttttgaaaagtaaaaagaaaatttacaaaactataaaacaagttatatatgtatatataaaactagcatattaacaaatatatatgggtaattatataaaattatttatacatatataattacccatatatatttttcataattacccatatatatgtatatgtatatatatatataattacccatatatatgtatgtgtgtatatatatataattacccatatatatgtgtgtgtgtgtgtgtgtgtatatataattacccagaattaaacacctttaggtgtaattagagtacattaaaatttggcatactttcctttagttcttttctaaattataaaagtaacatatagtatatttttcttctctaaaaatattgaaaagttaaagtttccttatccactttctcctcaaccagagctgcttctcccaaaatcccaagggaatcattattttgagtttgctgtagatacttcaaacgtttaaaatatgtatttacatgcatatatatatatacatctagaaaaatactagcatatgttattttatgtagtttattcagttacttacatagtacagtgtactatgtaagtataattcacatcttgcttttttctttcaacactgcatttttgatgtataggtccctgatacactgggtattcttcagacggataacatttgatttagattctgaaagagggataagattttgccaggtcaagaaaggaaccggtcaggtagaacattagtttacgtattagcacttacttcataaaggcatggaatagactgcggaaaatcaaggttgctggactttagggtggaactggtgagagaagagacaggagactgagtaaatgcagaaagggtggccatgtagcctatggcagatattttgaattttcactgagaggcagggatattataagtgaaggtgaagtgtatcactttgctagagctgctgtgacaaagtgccacaaaccaggtggcttaaacagaaaatgtgttgttctggagactagaagtatgagataaaggtgctggcggggttggtttattctgagaaccataaagaagaacctgccttgttctctctcctcttcttatggtttgccagtaatctctgccattctttatagacaagtcaccccaatctcggccttgatgttttcgtgacattctctctgtgtgcatgcctctgtccaaatttaccttcctttatttttacaatttttattttaagttcaggggtacaggtgcagtatgttcagatttgttacctaggtaaacgtgtgccatggtggtttactgcacaaaccatcccatcatccagatattaagcctggcatccattagctcttctttctgatgctctccctctgcctccccttttgctgtgcagaagctctttagcttaattagatcccatttgtcaatttctgctttggttgcaattgcttttggcgtttttgtcatgaaatttttgcccacgcctaattcctgaatggtattgcctagattttcttctagagtttttatagtttgggattttacattttttaacccatcttgagttaatttttgtatgtggtgtaaagaagaggcccagtttcagttttctgcatatggctagctagttctcccagcacaatttattaattagggaatcctttccccattgcttgtttttgtcagatttgtcaaagatcacatggttgtaggtgtgcggtcttatgtctgagttctctgtgcttttccattgatctatttgtctgttcttataccagtaccatgctgttttggttactgtagccttgtagaatagtttaaagtcaggtagtgtgatgtctccagctttgttctttttgcttaggattgacttggctattcaggctcttttttggttccatataaatttaaattttttttctaattctgtgaagaatgtcaatggtagtttaatgggaatagcattgaatctataaattactttgggcagtatggccattttcatgatattgattctccctagtcgtttatttttatcctctctgatttctcagagcagtggtttgtaattctccttaaagagttccttcacttcccttgttagttgtattcctaggtattgtattctttctgtagtaattgtgaatgggagttcattcatgatttggctctctgcttgccttttattggtgtataggaatgctagcaatttttgcacattgattttatattctgagactttactgaaattgcttatcagcttacgaagcctttgagctgagccgatggggttttctgggtgtaggatcaatgtcatctgcaaacaaagataatttgactccctctctttttattcaaataccttttattttttcctcttgcctggttgccctgactagaacttccaatactatgttgaataagagtggtgaggaaaggcatcgttgtcttgtgccagttttcagggggaatgtttccagcttttgccctgcagtatgatattgactgtgggtttgtcatatatgactcttactattttgagatatgtttctttaatagctagtttattgagaattttaaacatgaagggatgttgaattttttgaagtacttttctgcatctattgagataatcatgtgatttttgtctttagttctgttaatatgatgtatcacatttattgatttgcatatgttgaaccaaacttgcatcccagtgatgaagccaacttgatcgtggtggataagctttttgatgtgctgccgaattcagtttgtcagtattttattgaggatttttgcatcaatatttatcaagtatattggcctgaatttttctttttttgttgtgtctctgccaggttttggtatctggatgatgctggcctcatagaatgagttagggaggagtccctcctcttcaattttttgaatagtttcagtagaaatgtgtactagctcttctttctacctctggtagaattcagctgtgaatctatctggtcctgggcttttttagttggtaggctattctctactgcctcaatttcagaacgtggtctattcagggattcagtatttttcctggttcaaatttacctttcttataaggaaggcaatcatgttggatttgagtccagtctaatgacctcattttaactttgttaccttggtaaagactctaccttcaaataagttcacaatgtctaactgtgagttaggaatttaacacatgaacccattcaacacatgaacctttgggggcaggacttaatttgacccttaacatgaagtgataaaaatattttttagacttgataattgtagctcttgtttgatggctgaagtatcaagaggattatgagaacagacatgaggctatgaatatgttgaaggattggaattttggatcactcaaatgtgatccaaaacctctggacacccttaccctttctagatatattttttccccttaaagaactcaaaggagaacagagacctggaaaaatatctgtggatatctggaagtaagcactgtactagaggttatcttgtatttgtctctagtttttatgttcgattctcagaggcaggtatttcattgtacaaggtgcaataattatggagtatacattttatttaatcacataggaagtggtttattataaaagagaaagaatactttaactttaaacctgttggacaaaagggttaagtataactttctcaattacttaggcaaatatattcttgaaaataaaaagttagaaaagagggaaagactgagaccctcaatgttaaataacattttataatgatcacatgctgagtcaaaggcaaaagcaatttctaagtcgcctacttaattctctagaccatgcctgctatcttatatttatatcttaataaatgtacatatgctgccttgctgttttggggacaatgggaagtataaatttgatctttcttgaattctccacatttaaagtctccacttgtcacttgaattaacatagtattttagcatttaatttcctggggataccagatgttttattttgtgagtttcttttatttatgttatagttgtggtttaaacaactatatgttcatttaaaatgaaactcaaaaaagaggaaagaatggcacaactcaataaatatgtagtttaataatattcagtgaatacgtatgcacagtgaatggaagtctaaataacgtactccagtgaagaattattagatgttgcccgtctcagctggattttcagttatactattcaagctggtgggaggtttcaggggaagaacaggggagaagacaaagcagaaacagccttaggcagtataaattctgaatacctttaatttgattaacttgttaatactagcaggagagttactttgttgtattctagggattataacatggcatcatttgaaatgatatggttcccactgataaggggaggatgaatagaagcatacactgaatttctctccagggcattgagttcctttggcgacagcactgttggctaaatatgaaaggctgtgagatgaaatggcagcaagagaacagcagaggaaaatgtaaggcaaggatgggaaacacatgagaagtttatacctgaccatctcttttctatcattggcttcctatctcctattcttcttctttgtcaatctctgtagcctccacctttgctcaaattggctcagtgatatgattttaatactaagcccacacccagttggtatgaagacattaagtaattaattaattcaataactatttgctgatctgaacaaagtggacaaaaaaccctgtctctgtggaattttcttccaggcatgaggggcttgggaatgggtaacaagtaagtaaattatgtaacttgtttgacagtgctaagtgctacaaagagaaactaggtagataaaagaaatagggacttgggaggttgaaattttataaaaaaaaaaaaaggtcagagaaaataccacttttctgatgagttaaaaagctatgacctgctaatttttatgtatttattctgtgtccattaaaacttccagaaactttctcttgaagtgacatttgagtctcaagatctggccctggtgattatattgtgacacactgtgatcattacaaaaatttttatcatcatgtataactgtgatgctattttgcttgcagcccagacaatgtgatggatttattaaaacattctgataatcataagacagtgattctaggacatgtattatcaggacctcttctgtacctgtgtttggagttgccatagatgaaagtcatatgataagagaaaagcaatatgataatttgtaagtgagctgcttataataagcaggatatgacagtcaacatttttcctttttacctttccttccatctctacctgttttctttgttatagactttgagttttgtatgtgtcaggtttcattcatttgggaaaccaatgtcacatcaaattaggaaggatgttatgaccctctaattggcctttgcattgtacacaagcctcctatgtttgttcgggatagcaccacgcatccttttaaattggtagtttgactgtcagtttccgtaatgcccttgacagtaaaacaaacacaactctatgtgattctattatgaaacattaatcttctgactgtatggtaaaaggaaggggtgagagtttctctccattcccccaaaggaaggaagagtaagaaagaaattaaaaatgtaaaagcactcccaataacaggtcatcaagtcacagcttttcattgtggccactctttgtcagctgtgtgtgtgacaagaaacaaatcacagctccatgatatttgatagccttgagtaattaaagagtcttcaatgctttttggaaaatgttgtccaatattccagccacatgcagtgctcccttaataactcaataactccacatttctctccctgtgtgtgtttgactattgctatcccttttagagatatttgcatgtaatcaagatagagttcaaagatttaccattttccttactattattctatatttgaatatccctcccacttccatttttttcttccgataggggaaataagttaaccaaaattcaaacaaaaatcagttttaaataaatattcctaataagaattattataactactaccacacatacatttatggtaggaaaatttagaatctgtcctggaaaaaaatacgtccagattatttacaaagatttgctttcagaatccctcttgagataaatagacatgttgggggtgattctgggatggagcaaacatgtagtttgggtcgcagtttaacgatgtagccgtagtgtattaaggctatgcatagcaatttctcttgccctggagtagttagtgtcaaactctttttacccattaaacatttgaagtagatttattagctctaaggattcttggttcttcctgaaaaggaattaagaatctttggacagtggacttcttgaaaatcctatcaaatacccctaagtatgtttctggtagcctctcggttgtgctattcagtgatgaataacacagagcttgattgttctaatttagcggaagaaacacattttttttaatgtggtttttgccattttctattatactttaagttctgtgatacatgtgcagaacatgcaggtttgttacataggtatacatgtgccatggtggtttgctgcactcatgaacctgtcatctacattaggtatttctcctaatgctatccctctgctagccccccactacccaacaggccccagcgtgtgaggttcccctccctgtgtccatgtgttctcattgagaaacacattttttaaatacataaataaatatcacccttttgtcatgtatcttcataagcaattgacccaaccaatggatttgcagtcagtgaaaacaactttggatagatgggtggatggatgaatgaatggatctcatttatttgtgggagctaaaaatttaaacaattgaactcatggagagagagagagtagaaggatggttaccagaggctgggaaggttaaggaacttggagggaaaagtggggacggttcattggtaccaaaaaatagttagaaagaataaataagatttaggatttgatagcctatcagggtgactataatcaataatatcttcattgcacatgtcaaaataactaaaaaagcataattggattgcttgtaataggataaatgcttgaggtgatggctaccccatttaccctgatgtgattattacacatttatgcccatatcaaaatataacttatgccccataaatatgtacacctactatgtacctacaaaaattttaaagaatgtgaatggttgaatagataggcagatagataataaagtaattactatttatttttgatttcagaagattttaacagggcccttgattatcattcatctgagatctacccttgtctgtatggcttatttgggttgtaggtaagagtcattcttgaatgagtgggggtttctgattatttttaaacagccattcaagaccaatgcagatacctaggaggaaaatgtttctgatttttatgaatgtgtatgaaaccggtaaatattcataacatagctaccaatatatgcttctgcaagccaatctaaacaaattgccagtatcaaagattctgttgatgaggaatagacagcctgtgtttgcagtcttgttaaggtggttaacagtggtgtcctgattttttccaaaaccttccagatttgggctgctgagtagatgatgctgacttccgatactgcttgttgttgttgtttaaaccattgagcaggttacgaacctctgaacttaaacgaaagaaatcagtggtttcagctggaataaaaaagtaatactatggtatagcataacggagataatacaatttttgtggttttaaaacagagaaaaaagtccctcttttaatgcaaaatcacctgtaaccttgaatgtatcaaccagtgtgacttagctgataatttaggcctatttcatagagctgttatgagaactaagtaaaatcatgcacatacaaatgattagttacttttaaaaactgtaaaatgcttgctgttattgttgctggattgaagagttcattgtgatggtgccattcaatgactatatgactaagatgatcatcctttgtactctgtctccccatctctcctccctcccttgtttttccatgtggtatgtgttttctctctctctctctcttttttttttttttgagacggatagtttcattcctgtcgcccaggctggagtgcagtggtgcaatctcggctcactgcaacctccccctcccagggttcaagtgattttcctgcctcagcttcctgagtagctggaattacaggtgcccaccaccacgcctggctaatttttgtatttttagtacagacagtgtttcaccatcttgaccaggctggtcttgaacttctgacctcaggtgatccactcgcctccgcctcccaaagtgcttggattacaggcatgagccaccgcgcccggcccgtctctaagttattttctaagctaaaagtcatgctactgcaaccaacggatatccccccttttttggagatacttggtaatgtagaaactatttcagagagtcaaaattctacagatagagtttagaatgcacaaaatctagacatggcattgaggcatctagatattgcctttacctatttcctgtaggaacttgctccagattagtatcttaaagacaaattggcatttatttttcttacacacattgcattgtgccatgtaagaaaattacagattaaatcagcattttcctcctgcttgatgtgaataaaatcaatgctgaaatgggagtcctagttaatctatgtgatagaagttactaggaccagtgtttggtggcttaggtccttaaagaaattggaaagctctttgcaatacagtgtgttaacaacagccttttctttttattcccttccctttgcaactgttcccagcccttctttaaaaatctaagtcagaaatatattgaagggctttatttctatccatttttttctatctgcacatggctgttgatattccttcactgtcttggagctatcaactatcagtcttttgtaaagtagcatacatagtaaagtatcaagaaaacattttctcaagccagactgcctgtgctcaaattgcagctctgctacttactggctgagtgaccttggacacgttatttaacctctctgtgcctagtaaccactacataggagggtattttataaggattaaatctctgtaacacacgtagaaaagtacctgccatatggtaggcacaatatacatttttgttaaataaaatgaagcttagtagtttacctgcattgttcacattatctaacacattaccttccacatcgtaggtacacaatgaatattattagtcatgacttatacatgactaaatgtattcttaaattggagtggtacaaaaaacatatgggtccattccacatttctacaaactagctctgcagtcttgcacatcaaattttagtgtctttggagcttccttctcatctttaaaataaaaatatttgcccaatgtatttcaaagggtaattttaatgatcaaaatgataatgtacttccaatgagttgaaaaaattatttctctatatgaaaggtattataacatttttatttctcaaattactaaatcagttctaggggaaatatgctagtaaaatagttaaggcttgacagatataactggtccagaggtcggtagtcatcatgagtactaagacctagatactaggggtctgtgtttgttcttgagaatacagcaaagtgtttcaaggaaggaggcttctcctttacttaccaggcctgttcagctgtatttggctacttcttgttatggaaggaaacctgagcagaccttgggaatccagtgttcctttatcacattcctcagatctgttaggctggacgccaaggacagtagtttgaaggtgtttgtcttgatgctgatggatgttgcagtctgtaatccacgaactgaaacagggcttctcttcattgcagctggcatatcttgttgtgtttatgagtctgacaggcaaacatatctgaagcatatctcatatgctgatctgtgagggagataagccccttgttttgcttgactggaaacaaaataagcaggtggcagaaaaccctgcattgatttctgcttgggctaaaacacccagaataagatcaagtcccccttgggcacactccagcctctgctatttgatcattgatcatttgacttaagtttgcaaattgttgtagggaagtgtaagtttctttctgctttaacaaagctacttttacttattttaattttataagctattagcactattttgtgatagaaaaaactaaaaatcaaatggtgtcagagcttaaaaatctcttacttcatttgccgtgtaatctttatgcatttgatttttgcttcaggatccttacctataaagcatacccatttcatttgaccactagatttttacagaataaaaatagttcctttctgaagaggaactatgaaagtgtatacatgggttaggagatggagctgaggactccaaagtaatcagtccctgataagaacttgagttttgatgcacacattattgcattttagagattttggtctcccagttagattgtaaacttattgaaggcagtaggacattgacaatgcataaatattagttaggaaaatgaaaaataaagtgttgcttaccaattcagagattcagaagaatgtggataggattttttccctctcacctgaaatttcgactttataaactctttttattactgtccttccttttctgatcccttgatgattattaattggttccagtggtgtatatttcagatatttaattaagtcttcctttctgtccaactctctgccaaaacatatttttcatttttatacctgcaatgctcaaacataagttgatgccaaatgcatgctgtttgattacattccatccagatttacttccaagcaggacgaggcctgtagcatttatttcaagtagctttacaaagagccattcttggccctcaatgtgtgtggcaggcggggaggcaggagaggaaaatgaggtagatgtccttcccataccttaactagtttttgagagaaatggaaaatggcagatcagatgccattggccgtttgcccaattaagccatagcagtgttagctaagatgtgatcaatatggaagacttggtctgcagagccttttttagctgtgctcctgtactagtcaagcacctcctgcaactttgtggtaaattcaagcacctcgtgcaactttgtggtaaaaaccatcctcatgagttagagccttgtcttataagaaggaagaggacagcttctgggtgagacacgtgctggccatcatgctgttgcctaatctgtcacctcaactattgattcccagctcttgattctcattgttcattcatggagttgtttctaaataatggtgactagagaggaggaaatggtgttatattagttctctattgctgcataacaaataactccaaaacgtagcagctcaaaaatcaacaaggcattacctcctaatttttgcaggtcaggaatccagatgtggcttagctgggtgcctctggcttagagtccctccataaggctgcaaccgaggtgacagccagggcttcagtcacctcaacttgggagagatctgcttccaagcccttacctatggctggtggcaggccttagtcattgtggactgttggccacagataatacttcattggcacaagagcctttctacaggacagcttacaacttaatagctgtctttgattgagggttggggagaaggtggaagccattgttgttttcaatctaatcttgaaagtgacatcctgtcacctctactgtattctattcatcacttagaagtgagtcaataagtataggacatttaaggggagggaataatcaagggtatgaataccaggaggctgagacagttgggagccaccttatagactgccttacacaggtgtaaaaagcatgaaatagacattagacaaatgcagggtctgctgagatggcgtgtaaaaagttctatcacagggcttgccacagagtagagaagcattgcatttatttcttgccacccccagcacattgcctggtgcattgtgggcactcaagtacctacatgcccatgaaactgtgtctagtttactaaaaacaaagagtctctctgttccaaaagagattaatgtttggtgttatcctttctggacaattttcttcctatgcttcatttctccagttatcgtcaagggaatggatttaagtctgaaataaaatcactcaaaaataaggaatagctgaagcagacctagaattaccttggtggaattaccttcttaagaacaattagaagtttattctttaggtcaggaatgctgttgccaatcttccacagcaggtgataagaattaaattccctcatgaccgaggaaacgttctttctgctaatctggttccacctggaggttcaacaaatagaagatagagcacacggtgtgtttagtcttaaccacatagcccgaggcactggggaagtgtccacacgatgtttgccttctgtgaacctggaaagcaatttttttctagttttcctttttttcctcttcttttcctattcatctgaattcttctgtagttaaattattaatttctctccctacagaatataataaattactatccttgttaattcttttatcaaagatatgtactaggcttctgcttccacatgggccatttgaaaaacagtgcttcatatgatccctgaactttttggcaattataaagagagatcacaaatgagtaaggttgaaaattaaactataactggaatgaaatgtcctataggactaaacctatcagttgtattgcagatcagccccttataattggtgatgtggtatgagacattttatataactataatatataggccataaattattattatatcagtctgtggtataatattgcaccttagggtagaatttgctccatttacattatattcaggcagaaaaaatgaaaacatctgtcagggagagtatagccctattgatcaggtatatataagtaaggtttacttatataaggctgagaaaaggggctttccatttgatttcagttgttttatagacaagtttctagtttgagggagctatttagaaatgtatgtagccttatgtagaaattccaataaagctttcaaaaaataaagctggtatttatattggttgaaatggcaagataatgagtctaaaagattttcccttctgatgttattttttttgttgttcagaatgacacttgaaagatgcctaggatttctactgctgctcttagaatcacaggatctcagggtaaaatcaaactttagaggtcattaatttcaaccagccataaaggtctttttgtcaaacttatgaccattcaagatactttggtgtcaaagtagctcacaagataaaataaatcactcgcatgttaacccataggaggttaaacttttgacagcagatctgtggtggtagataccatgttttctactgtcctattggaaatgagtgttagaggcccatttccactacaaatactgcctagtggctgacttacatggtaaaaatccatccaaccttgctctgcatacattccagaactctaatgcaaaatgatgcctaaaccattttaactctatccatgcatgaggacactaagtaagatgaagcttgttttgatatatacactttttaaaaaggtagaagaataagaggtggtaaaataagttattcaatttattgactatagtaacaacttggctctgattgttaatgtttgtccctgccatgtgatatatagttgtgtgagattaaaaacccccttgggtataattttatttacaccaacacatatattttgaagagatgaatgaccaattctgggaatagttagaagtaaagaatttgaattttctgcagcactgctgcacgttaggtaaattcctctctttgggcctcacttgcaacaccaataaagagaggaagttatactagatgttctataagccccttccagccctaacatgctattagcccatgattcttgtgtagggataccagaagaagatgaaagagagaacctaactcattttctgtcaccagtccttataattcatggcattgtgtatttctccttgagtcaacattgcttcttttagtgacacaagcaagcctgctttctccagctcctcaggaggcaactctgctactgcagaacaaagatcattctcttcctggcactcttctgattcctggtacctgtattcagtttcacattccctttcttgttgaggatgccattgcctatagaaagatactttaggtgaattaccaggcaaacgttactaaagcaaagataactgataagggggactagaatcttggaatttgtgcaaataaattcctttgtgaaactgcagactgattagaaaactgtcatagtaaaatactttaagcatgtccttttctcattttaaaataacaactggaaggaaaatataaatatatcactgaaataatggtttctccatgaagaaaaagacatttagacaaaccaaaagtgtatattctatggtgtagtaaatcattaccttactatattaggttaatacttgataaaaccttgtagtgagataaatggtgatatggagaacttaaatcttcaaatgtatgttttaagccccattatagctattttttttcaaacttacctactataaagttttgtccagagatattccaaaaaagaataatagattggtattaatgtttctgcctcttttactctttggaagacgtgccaataggcaggtaaagagatcaaaaagaaaaagtcgggcagggtgcagtttctcacacttgtaatcccagcattttgggaggccgaggcgggtggatcacaaggtcaggagttcgagaccagtctgactaacatggagaaaccctgtctctactaaaaatacaaaaattagccgggcgtggtggtgcacacctgtaatcccagctactcaggaggctgaggcaggagaaatgcttgaacctgggaggcagaggttgtggtgagctgagatcatgccattgcactccagcctgggagacagagtgagactccatctcaaaagaaaaagtcaaactagatcaccatttacttaacaaggagctgttagtgtattaagagtattatgccattcagtctgattaaaccacctgaaggaacagtggaacctcttcctaatcattcccatgtgagacttcctgggagacagctgggggcagccagaagcaagtagctagagaggactgtggatttctttgtgaggaaatctgaaactggccactttaaggcccctgggttctactgaggttaagcgtctaaagtgtccttgactcactcaatttcaaagcaaattcaatttgatctcttgcctaataataaacactgggcagaagcagacatggaaggatttggaaaatggtgttaaaagatcaaagagatctaaataaactattttgtttgaactagagttaccaagtagaatagattgttttaccatagatggagactctttgagaaggagttaaaatttgtgggagatccccaaaataatggcagttcccacacacacttttcccccagagtgtatataggggatatataccactttctcacctccttttccacttcttatcattgttagatctctagaaagttcatgtagcttctttctcctttgtcgttatatgtttcagatacctcaccagcttcctttgctttcatttaccatatcatagtggtaatttcctcaattcctatatcctacaagagcttgatgaatgaaaagaaggaagcctgtgacaattattttattcaagcctccaaaacagagttttgccaaatgcttgtcctacttctccgtgcgcttgccatggtctttgttttgcctctttttcttttggcagttaccccaactataactggaatttcctgattgatgaagatttagtggtccaaacacagtcagttgtcttttggccagaaggaaatatacattatataatccggtggtttatcttcttatccctcccccattaacttttttttgttttgttttggtttttgaatctctgcttcccttctccatcccctaagcaaaagcataaccagcacgttttttagcatttagtagatacaagcctagcattgtgctaagtattttgcgtctattatctcactaacttttcagaaccatcaatgaagttagttcctttatcatccttattttgtagataatacaattgagatccagtgaaactatagttagcaagtgtaggtgcacatactaaaaccaaatgaatgacttgaaatcccaagtggttaacatttattccagaatactttcctaatctgtgcctggcactgcactagttaatgaaaacagagtgagaaaagatatgatgtgtccagccaggtgcggtggctcacgcctgtaatcccaactctttgggaggccgaggcgggcagatcatgaggtcaggagaccgagaccatcctgaccaacatggagaaaccgtatctctactaaaatacaaaaaagcagccaggtgtggtggcatgcacctgtagtatcagctactcaggaggctgaggcagaggaatcacttaaaccctgcccagaggcagaggttgcagtgagccaagatcgccactgcactccagcctgggcgacagagtgagactttatctcaaaaaaaaaaaaaaaaaaatgatatgatgtgtccaagctctttgtctaatgaaggagacagatgtcaaaaagataaattactatacggtacaaaaatgctcttatagaggtatgagcaatgttctatggcagacaaaaaattagaaagaagacacccattttcctcatagtaaaccaaaaatgatctaaaatattccatgtttgttaaaaagcaagatctttatggttactgttaggcactgcggtatgcctccctggattgtcaataccaatgccatatagatagaacaaatagtttgaaaagacatgaggacaaaacagtctccctgtctcccaaataatagatccaaagaattctctggatttgaatttaatgttcaagagaggggaaggcataaatatataaacatatatgtttcatacatatgtgtatacatatatatgtttcatacatatatatatacatatatacacatacttatatatacatacataaatatatttatatatccacttaaaacatatacaaaactacctatacatatatacatctatatatcacatgtttcaagaagctgttttctactaacatcttcatgtacgtaaaatttaggtgttttataaatttatttgacagagcacccctaaaccttttatatacacacctcatcagatggaagtaatatataaaggaaaggcactggcttcattcttctatttttaaaaggagtgaaaacatttttgcatttgccaaactcctgtgtatgcaaactaattgtgtgtgtgtgtgtgtgtgtgtgtgtgtagacacagcaccatttttggtgaggatggcacaggggctctcaaaagaaggagttctcagaatcatagcaccaaaacgttgtgagtttgcaataatcagagtcatggtgagcatcatggaaatttagaactaaaagagatgttacagattatctccagtctgagtccctgccacacatgagaaactaaggccaagagatgttaaatggcttgaacacagaatgatcagtggaacaatacctagagcttctgtcttccaaatgagttctttttccaccttatcatgcacgttacatcaggcatgaatactggaaatctttctaatgtagggacatccaagcaaaacaagttgcatacatgtcataaaaaactttaaaaaattcagatttacttctggcaaattcattcaggaattcaaactcagataattaaattaatttcttaatattcaaataaagaccagatacacattgacatcatctctcttgtatattcagagtaccagataaatgggatttttcactagggggacaggattgctacactacaccattgccatttgcattcacaacacgggatggcggaagagacattgatacaacattttttctgcctccttcatttttaaatggatggtgacatgcttcacagcagcatctccaaacaaaagatgacaaattcccatttattttccatcagtggtactgtgtgagatgttgtactaagtctaagcttgttgttcctgaggcacagaagtctttttcctgcagcatatagcattactgtaaaaataaccattccattgccagtcactctgtcaggagtattggcagagtgaagaagacttatttgatttcactaaagctattagtttgaaattctgatctgtaaatctggatgggaaccacacgagggaaaggatccctgccagaagcaatgggtcttgtacattctcaaaaacaaaggtcagatgaaaacactggattgaaaatagagccctagaaatgaagcaagaaggaaggaaacttatattgagcgtttgtaatgttccaagcattctgttaggctgtttacattatgtacttgaaaccgtcaactggattcatcttttccttcctttttccaccattgctggcatgtgtgcaagtgggggacccagggaatagagactacaatgtaaaaaatggtttcgctgttatcgttgtcatgttttcctatgtaaaaaataggataatgtgacttttgctgttgatagatgtttcttcaagatcccagtagagtattttgtgactggaaaatttctagaatcttgaaggcaaaaataagtgaaactgtagagaagtgtaggaaaagtcatcaggggttttacataaaacagtttttattaaatctcctttggaagggagaattacaactatctgagctaagttttgttgtgatatgaacgatagtgactgctaaaaggatagcatgggaaagttttttgtttatttgtttgtttttgagacaggatcttgctctgtcatccaggctggagtgcagtggcaggatcacagcctactgcagcctcgacccccacccctaagctcaagcgatcctcccacctcagcctcctgagtagctgagactacaggcctgtaccaccatgcctggttaatttatttatttttttttttgtagagatgggggcctctatattgcccaggctggtctcaaactcctggccttaagtgttcctcatgcctcagcctcctaaaatgttgggattatagatgtgagtcactgcacttggccagcaagggaaagttttgaggagtgatggaaatgttctatatcctaattgtggtgatggttacataaatctatacatgtgttaaaattcatagaactatacaccagaaggaaaaggaacccttcaatttcactgcatgataatttacaaaaataaaatttcaaaaattccagtagtcaactctaagccaataatatgttggactatgtctaacaaaagggatattatttaaaaatattgccaactgactatcattaaagcctaataaataataaaaaagtactgtcactccccacatgagacaaaattgtcatctttacatttatttcttaaaattattctttcctggcatctgtaatcatctatggcttcttcatttcctatgcccctctgctgtttggaaaatcagaaaatagaaggcattttggcattcagggtgataggtaaatgcccctattgtaccttctaataggtcaaatatggtgactttggttggttcttatttttgttatttctccagtcatcaatcgtattgatttttttaaaaacaaaggtcaagcacatgttcgtaggtgacaccagttgcttcagtgagttggtcccttctgcttactgttctggtttaaaccccttgtggcattttctactgcatggatagtggtaaatggggttgatagtgacatagaaatgaacttagaagtaagtttatagactgttggggaccatctgttaatgtaaatgtttaaggtaaaatgcattaaggcttaagagctgacgagacgttttatttgcctcctgcttttgggattatgcctggcacctgcttgagtctagagggttcctggttaaacttgggaaacctggtttcctcttttatctgcagctgttcgttttctgggatggaatcctaagcacttatttgaattgtatttgttgaagtcactgggttatacagtaaaaataaggagtcatgttggtttttgttcgaagttttaaagtatgtaaattaaatacatttatatggctaattgtcatttatggttacctactgttaaatagttgtttaatttgttgtcttcagcattgaaaagttaagcagtatcccttagcactatcaatgtcagtcaagataacagttcatttatttcatagattactttgattaaaatcactattaaagctatttgaattatattataattttctggtgatgtcataataaagaagtttttgaacgtgcccattttatttttaacgcttcaatgtgtattactggagaagaaattgaagtaacatatttttactgttaatgggaaaatggtcttcttcaaaaaggaaaaatcaaacttacctcctagatataaatcaataattttcatttctagcattaacttagtagtttaatgacttgggcttatggaatgattttttttagaccacatcagacctacccaagggaaaggaagcacaaaaaatagggaatgatacgtagaattagatggcgagaagaaacgaggagagagagggaaaaagtctgaatgcaagactattgaaataagtgagtaacacacttttccagaaaagattcatattggagttttctagaagcctctgagtatgatgaggaaaaagaagtgattaaaatttgaatggtttccctatgggcggataaaactacctgttcagctggaatgattctgatgaccttgcctctgaagcttatcctttgagatcagcaaaaaagttcatgttctcatctctcatttgagctggagttgattgatgcataattaagatccctaaggaacaggtgcaaaagctgcagcgcttctagattcatccatttctctctactttttaaagaccagtctcatgattctaatactataaacacttggtggcttggtattgggggcagagagcttccggtaggatgacatgagataggatgtcatcctgccacagggaataaattcttggatgaaattctacaggtcatttagcccatctcctatattgcacaggatagggagctggggactcctgaggcaaagtcattttctcaaggccgtgtatctggttagaggcagaggtaggaaggaaacccaaatctttctatttttagaccatttgcctctctactaggccatccctcgctttaacttgggatcttaagcttcccttgtaatttcttgagagtaggttttaatcttcctactgtatgctctagaaactatatgctgggggaaagctgaggggatagcatagagtaatatccaatcttgaatcctttctctcattttaaattgtggtgttttaaattagcataggtaacatagagattattactcagttgaccactttgcacttgatctgagggacattgcagagtcatcacagattcttgagttatgaggtcagtatttaatgaaaggatacgtcgaaggcttttccttaactttcaaggacctgtggggatagtttctactcaatgcttctttttattcgctttcctaataaaactaatatttaattataaaattaaaatgaaacaagtttggacttccgtatgaaaagtcttatacttgatctgtaactacaagatgttagatgttcttcatggagatgacaggcaaaggttacttttacagttctatgaaagtaaaaagcttttaaaacatttgaatgggaattggtaaaagaagcagttcttaattatgtcaattgtctgtaagagctcaggtgattatggtaaacacacctgataacaataacttaagagagcaacaataactttacagcagacacacctgaatgttggtgggagttctgagctaaggaacccagaagtggccaacctgaagatcaattccttgtctacgaggaacatctgatcccctggcctgtcccttggaacatgggccatacaaggagttgaggccctttgttttggattaaatgaaggtttccaagcggacgtggttaggaggagggtactaagtgaaaatgtgatgtaaactgcctgccttttgcaagtggttctcctgtctagcctgctacctctggactctctcccctgtatgcaaggccccagtaaaaccccaggtctcatttgctggctctgggtctctccttcagcctcttgaacatgctgccatccccggtggagtcaataggaagtcggcacaacagacaaggaagagctgtcaccttgcctgataaaataatattctaaaggggaaagtacatatttataacaactggcaagccttatgacttaaatgaacagagctctgctctatggaaacacagaaccaacagtgccaggtatgaatagggaaaacttcttggtagtggtgataccttattagagtcttgaagagggcatatttcctggtacagaaaagggggaacactcaagtagaagagtaaagcagaaaatatataactctccattttctcaggaggtctaactcattacagttccatttaacccaatcaaaaccaatgctcccctttccctcacatctttaccgcattcttttaaagaagcatacgcacaactctttgagcaagaaatatcaggcaaccgctgccatcttagctaaaaaatcttttatgtttgagaacttacctggaagagtcctctggagagagaataagaagatgctttcagttgcacttggagagaatgtgagaattaatcgcctgcttgtttgggaaataacaactagttgtttctggttaaagcaacaccagtatttggatgagttggagcaacgtcagaatgattggaaattgctcaaagctcacaatggtacttgaagtaaaaggatgaaccccttcaagaacaatgctaggttctcctttgctacatggagggcaatggcgcatgataggccagggagaaaagaatcaccagatcctttgcctacttctgccaaatctgttgcaatgtttcagataaatcacttgaactatctgagctttgaagtgcttcagcttccactcaataagaaaaattgtttgaacctctctcattctgctcaccatcttacccttctccttgaagatcagcttaaaataaagtgatttgaagccccaggtgaaatgggagccctttactacctcctgctaaaggtggtaaatgactgtgcccaactttgacctcctctagttagcaacatcattctaaacttagcccagacagaaaaggatgacagcaaaggtttgaacacttttaaaggcctctccctttccccagagttcttatatatctatgtatatgtgtataatatgtttgaatattttattataattatcctccttaagaaaaacaaatttcttggattttccctatgacttgggcttaagaagtctcttaacagttcctcagatgtagtacctgcggaagggaaggattaggttagaatatattcaaagtttgtataaaaaagagggtaaactagtcatttaaatgtaaacatataaacacttactttttactgtgttggctttgatattctttaatttctttgttatatcagccctttttttatgtcatgttgaaaatgtgccttcctggttaaaaggatggatatttggaaacaaggcagtttgaatcacagcacaactatttaattttaaaagacacttttttctaacctatataattcttaattgttctggacatgtaggctatttcagtgaaatttagaaagcaaggccatttcctacagctaagccctttaatgataattatgacaccaacccccaaagacatggtttcatggctaacagatcactctcagattttgtggggatagagtgttggtagcaggaagcggcagaggaattcaactccttcttgagcttcttgtgttttataatcctccctatgtcccacctgttttgtctcagaggggataagtcaatagagctgctgctgttcacaaagccatgcaggtaagagacatgtaccccttgcttcaaagtcttagtaaacttatagagaaaatatgatttgattgcctaacaatatatttataatttacataccaaataagtgaaacgtaaggaaaaaactgctttgagctcccgagaatgctagttgatagcaaacaaggaaggtgctttggtaagaaggttgtttgctttgagcttccatggatgagaagaaatcaagtaatcaaagaggaggaagaggaggaataaaaacatagttgagaatggaacagtcagagacatgtgggcactatcttttcagataggaattttatctttcttccttgttcaacagttatttcatacacgaatgagaaaggccaaacatagtcatgaacgtttgcttttttaccttctgcctcttcagtttttcaagaaacactaaactcgcacctaggaatattttgacaagcttagaaactttttcaaaaaataactcttgtatatggcaagatgttactaaaatcagattttttttttcccatggagacgatgactgcagaacttttcattcacaccctcaaactcgtgcagagagaagccaagatctttcttcttctgcacatttttggcatcattcagtggacttgaaagaaacacagaaaattccatggagaaatatcttaaactccagctcacctcttggcttctttcaggaatgcttatttgacctgaattaaaatgatgacttttcatctctcaatctgaagcataaataaagtaggaattttgcattaggattgtgttttttaaataatcataaaactcatattcaagtacttccttgaggcctctaaactaacacattttggattgctataaaaatagaatcagctttcctttgctaacatggataggtatttatatatcaattttatagaggactgactgtactgtaactttggaaacaccttctctttttaataataagaaatgttggctaagggcttgtctttcctggttctagattagctatgataatactcatccccttatgcagaaaagctgcttttagacttctcattgcttcccagttaatataacatagggattattaaagtctctgagtatgcatttctagatgtgtatagcattagatgaaaattccttaggcctttggaaattcttcctttcccttttagagaagaagatattatcctggctatcatacatagcaagttatatgcatataagataagttcccttttgccatgaaatcaatcttccagttacaccctgggtttgttctttcttttctcatcttgttcctttgcttttcacttctctaattttacccatcaagtgatcatgcatctgtttttcaccttgccctacaaacctctcttagttgctttattctccttccccagtgcttctgtcaccatggcttcatatctggccccacccctaccccatcctatgcactattcaaaatcttcattcccagccatccaccaactgtcagcagaagaaagtccaactctccagcctctttagaaagcagactttattccccacactacataatgcatagtaggggctcagtgataccaaatatgcagatcacataattaagtccatagcactgcctaaacatacatggtatttgaaggaaataagtcctgtcatggatgttgactgaaaatttcccagcatttacagcctagaatttttaatggaaacataaagccccaaatttggagataaaggagctacagaaaacagcagatgtcccagagcacacaaaccatgtggccaagagcaaaagggaactcacaaggaggtgtctgtattacgagaactcgtgcccaaattccttttctgtgagaaaacagtaccatataatccttttgtctcagtaaaaaaaaaaaaaaagtggtccaaagcagacagaatggaatatgcattctccctcctttacccctaaaacattctgtcttgatcaatttcatttttttttgtcaggtgcactagatgttataaaagcacttagcttattgcctggtacatagttatttgaaaaactttgaccatggaaaaggctgaagaaagctaagagtattctatataaggtctggaatgtcaagataagaaatttgcattgatctaacaggtaataagaagctccataccatattctttttacctgtatgtaaaaatcaagaggagttaatacaagtagtattttattaccaaaatagaagttgcatctggctcagactcagcctctgattcctcaggaggtttttcccacccctttccctattcctgctttccagctgatttgaccgaaggacagaaggattaagaaatcaagtagcttatctgagaggttccccatggggcgctttgtcccaggtgttcctgcttggagcttacataatcaggggctttctgcatgctgagggtattattgtaaaggtgattgtttaagtcagtgggtgacggtgtcaggataattatagccaggagatatatgatcataaagacctagttagtaccccaggagaccccaagacagggcttctgcccatacttttgcaatcacacattctgaagtaaggtggcaccatttaccaagtaggaacaaaagtgaatgattagggagaactgtttgttccagtgctctggggacaaaaaaaaaatccatgttaatcttttctaaagtgtccacttttgttatgtttatatttttgttgaggttctttgttcacttgcaactaaaccaacacgtagaactgaatgtgatttctactgatctagaaaaaaataaagttattattaaaaaggaaatctaaaggatgataaattagctgcatatttttctgttcgtctattgttttctattttctctatcttaaggttgtttataatagacagttctacatcaaacttgagatgaaattaaagttgtgaaagatttatgatgtgtgttccagttatggccaccagttctaatatgcagggaacacgtttgaaacgggatcacagttgactattaggatacaggactattcttttcagcagaactaaagagaagatcagagacctctctattttttctctccctgcctcttcttttgtaatcacatgattaatacatgctattgaaaaaggtttcaaaatgtaatgaagaatatcaagaaaaacatagaagtcctttctgactatctgcaaccttagtcgcctctcaagtgggaaccactgttaacatttcaatgtgcagatgtcaaaaaccatttgctctgactttacaaacaggaacgtgcatgcacacacacacacacccttgccctaaaagttttagttttaataaatggtgtatacagtcaacatatgtcctggatatctctccctgtctgtacttgtagaaatatgtaagttccatttaaattcaaagtcaaatacaatttgaagttttgctgaagcttctttctcaatacatgcttctagattgtagtgaataagtgactgaaatcagctagccagtttctaccacaacatgatagcttggttttatggctaaatgagccccaggaaggagtgtgagaaactcccaccttgctccattgttcatgaaggacttgcatggtgagagacccttgggtctcctttcatcccagttttatagtaaaaagatcaaagatcttccccaaagtctctgcccaactgggtccccaccctgttaccttctgaggagtctaaccctgagtactgctgggctttgcagatcctagagttgcgggttatgagtgtgtccagagaaccagagtatgtcatctggattcactcactcattcacacattcatttattcacactcaacaaatatttataccattattcatagggcagacagtgaacattaaaaatgtgaaacaataacatacagtccattcattgtcaaaggatactacagatcaaggaaagaggcaacttcaagaaagtatgattagtacattgaccagccaaatgtagaagcttctgtgtcagacttgacagggtgagggaaagcttcctggacaagaagacatctaattggaatatggaaggatgcttagaatctagccaggtgtggggacttaaagggtaaagcaagtgctacccagaaaacgtaagtaaggcagatctctttggcctgaagtcctcatcaaggagtttaagctttattctgagagtcatgggaaacaactgagaaattttaagaagcaaagggacctgatctgtaagatttatacaatggagaacaatatggaaaaggaaaaagacaccattaggatgctgctgcggatgctggggtgagtgatgttgatggctttaactaagggaatggccctgggaccaaagaagtgtgcatgttttcaaaagtcatttcttgctttctgcgagcgagcctactaaactgcctaagcacaccggttaagtgtggcaactttgagaaacagcataaaccatgggtgacattgcaaaactgaaagcacttggtgcagaggttagataaatatctgtttctagggggatatacatgtgtgcattcattgttttgttttcaagagacaattgtgcctgaggctggagcttgctcaccctatcttttggactcagagtatggggcctggtctattttctacatgaccgggctttagttcagaactgacgagtcatatatcattctgattgattttttttttcttttttctttttttcccctctcaaataaaggggttgcaggggtgagatagagattgctatgaaccatcagggcaactcaacccaaatatgcatttatcaggagccccctaagtcaagctctcctgtcctcacttggtttgtctactcagagctgagataaagaaataaagggttaaatgaggtcagttagtgggtaaaggacagagaaaatagatgaacagcccagcttggactgctctgatctctgccggggagaaatggttagaaggggacatggcagagttacaggattaccaatcagtgtcctaagcagtggggtagagctaacccctgaattgcctaccgtggcttaccttgcttctgaattcttgggtttggtttcatctgtatcctctgttttagccttctttttagtgccactccaaaggcaaggaccacaaagcataagcatccatttttattaaagcagaaaggtgaagacttaaaatgtgcttctgtatgtgtgcatttttaaagcaaccctttgtaagaatgagtggatttagcaaagtagatgcgattgaatcacaatggaatacatgcctcttactcggtctaaagtcccttggttctgcaaagttttttattctcttttcaaaccttatgcaattgtgacttcatctaaattattgatacagttctaagggattagtatcttctgacggcagtctgttcaatatatttgtattttttacccttgaaggaatatgggactgttagggttttaaaagaagtctgagtttttgtttgtttgtttgttttgttttgaatgacagtaaatatccattaaaaagctgtagatttgcagccttgatgattagctctctcttagactccagcaagccttactgaatttcctctggagatcaagtattgaggggcaaaatactggggtagagttgaaagcaatagagaagatttgttgacaatatcgatgattaaaaaaatgagcctttttaaacaagaaattcctgctcatacatttggcttctgagagagagaaagagagagagagagagagagagagagagagagtgtgtgtgtgtgtgtgtgtgtgtgtgtgtgaaatggggaaaaatatcaatgcatcaaaatggacaggtcattttgttgaatgtaactgaactcctaagcattcagagattaggagtattcataatttctgactggcatgcattatgctaatgtggctgtcctctgttgtatgcttctgctgagacagccactttactcctgcttaattttctccctaatggtagcagtagggacttgggtatctacagtgagcttttaccaatttaacttgctgccgctataggccgttataaattattattcttatttagcacttgaatctataatttctttctttccctcatgttctataaaatatagacttagacctaagttagctatgcttttcccttcttataaatctaaatctttcatttgcaacgagctaaagttttggatgctcaacaactgtaacccctgcttggcagactagagagttatcaaggaacttcattcattcattcattcattcacacgtgcttgccttcatacatttattcatctctgaatgcaataacatatttacagagcacctactattttttttttttaccaggcaatgctttaggtgttgaagataaaacagttaacaatatcgatttgtgggaagaagtactacctataatgtctagaaaatacatgtgagatttgaagaaaaatagcttctccatactgatattctcaaagtagtttttctccctaattatctgtacacctccactggaattcttgcgaaggttactttgccttctggattttgaaaagttgtctttgattttattactttctccctaatgtcctagggaaaatatttccttccttcctactgattattgttttagaatttgaaaattactggaaacctatatatgagtattttgttataaaaattcatgtgcatttgaacaagcacaagagtacttcctatgctggatgctagattctagaaaattttaaaaattttttaccagtctcccagttgtgatattcccagttagttaattgctttttctgtctctttctgtttcttcctgaggcccctcctccttccctgcctctctcttttttgattttttaattttattctattcttttttttttttgtagagccagaatctccctctgtcacccaggctggagtgcagtggcaccatctcggctcactgcaacctctgcctcccgggttcaagcagttctcctgcctcagcctcccgagtagctgggattacaggcacatgctgccacaacctgctaatttcttttgtattttagtagaggcggggtttcactgtgttgcccaggctggtctctaactcctgagctcaggcaatccgctcaccttggcctcccaaagtgctaggattacaggcatgagccaccgtgcccggcttccgcctctcttttttttaatgagcaatcataagttattatcaactagcatgcaggtaataattttcttatcttgttacttgtgttccaccactaataactatgagactgcaggcagtttttaacttctctgagccatggctccttccctgtagaattatgcagtacttcttgtgaaaattgagataatgtgtaaaaataaaaaaaaaaaactactagcactatatcagccaccatacttggctctcaccagcattctctgtgacccaatcgccagagctctgatacttattccagactcctggcaccatgtttctattgctgctgcccatattcccctcccccaacagatcccaatcacccttcttgcttgagcctattgctcaagctttctgttttgcctttcatacctgtcagttctaaatcttttccaggtattcttgatctctcatgtcgaccccattctgccactgacaaatctagttctgagagtgtgcttcagagaaatttagatttttgagataattttgatatatagtaatgagaatctcagccttatggcagcctttatgctttcagccaaggtggaatcctggccaaaatgattttttttttttttttactttctgccatggtgcctggaatttcttcaatatagactcatttcttagctcttcaaaggcttccaggtttttagattttccttctaagcctcaaatcctgttggtcatcaccctaaataatctatcacttatcacctgcaacatgctcaactgagataggtcttgtagaaatgaagcatagcctgaagttgagaacagaagaaacaggaggagaaaaagcaccagaagcaaatttattctcatatcccagttttgagaaaagctagcctactgtaaccctaggagtttggcggctgctaatatctaaaaatgcgctggctctgtagcttggaagaaaaagaggaacagccattctctttctgctttccaagggtaagcatggccaacctagtatcctgctgtgcaccatgaagcatcatcaggtgcagattaggaaatgaatttacattaagtttcaagaaagaatttctgacaatgtaagctgaattgacaagaacaaagttctgaaggaagaggccaaaccattactgaatgggtgatttgtggctgaactggatgaaccgatagcattccatggctagaatttgtgtcactggttcattctgtgtttcctcttattttccaaattgcattcaatcgatatggcagaaatgaatacccctatatacaattatttcaatatatcttatataagtttagaaggtgaagcctgtatatatttttcatgtaaatgtagtattcccctgcaactcagtgcaataactacccacagtgctgatacataggactctctcaatttgtcccccatgtcagaaatgctgtgcaaaatccccatagctgactgcaaaacctgccctgaagatcaaataaatgatatacatacgaattcctaataagtgctcagcaggttgtttgggcttatattagtctcctacagctgcctctcgggaagggataccccaacaaagtgtttgttaatgcttgccacctttagagaagtctcctgggatgctgcctaaacctacactgtaagcaaagtggaataacaagccctttgaaaagtcacttgggaagatgacaacccataatggtcactttggctaggatttaaaatgctttattattgtcgaattaaagcaccctggccatattgctctggatataccccgtcttagccaatctcaggtttacaatacaagaacaatctcaatctgatttgcttaatgaaaatgtatccctctactttaaaacagggagataccccagttccttaaaaatatatgttttattgcatatgctttaaaaaacctatttacttagcagtttcattttgtttgcagcctcattgcattttcttctctaattagcagatacatgcatcatctcttggagatgaagcaaatatttttcttttcctcattgggtagtttcccaggaaagaagctcacggcctcactctggctccgggtttgctgtgtgctttcccacacattctcaccctaccacacttttcctgtaatgttgctgagttcggctaatttagatcctttctctaatttaagttgctttcatttaacttggcttgagagtgtctgatacttacactcacaaacaaaactatagagttttagaactcagagcagtgcttcccattgagatttctggatgccacaatggtgcctgcaagaggaaactcatcggagtgctttcatcagcaaggaactggaattcctgaccagtgataagacaagatgactgtggcagcttcagatatatttacaatttgacattcaaaggccaaaggggaaaaaagatttttcccctgtatctcactatttttcagggaggaaatttttcagacgcttcctatcccacccaacctccagtagagttctccttaggtctcattggttaaaattggatacatagtcaccctttaatcaatcgattgcacaggaaaattgaatttccatgatgactatagcctaatcatgatgcatgtcctggggctgacccattttcctgagcacagaatttgttcagtgtaaccagtttctgagctaaaggaaaattcacttaacaggtagagaagaatagatgtgagtaggcaaccatacaatagtgtttgttttgaggacaattatgagtaggttttttagatacattgtatgtcacttgcaagtgtataagcagagtttgctatttttttgagatattttttgagtaactgtcatttctttgtgagatttaattctagaccctaattctctcactgcacagagagggagaggcatgggcaaatatatgggattcctgagggaaaatgtaggcagaggggtgtagggtggccatacaatttataacttaaagcaagacacttctgagagtcaaaaggagagctgcgaataactctaccaagtcaacaggtataaattatcctagacaaactaaactgtatggtaaagtcagatttatataagggagtatatttttaaaatgttatggggaagctaaagctaattttttaaagtttttgtaggtggagaaaatgccacctttatttaggatcataaaaaattccaaatttatatgaaactttttcatgtataattttgtttaaatcctaagtcttatgagacatgagacattgactgtaataaaaagtgcaaaaacctctcagatcttataggtattctatgataaatttggaaagtgtaatattagcatctataaaatcaaaatattgcctgttggtttctgttcactggaaaattataaatgttgatcattttgttttacacaatgcctgtgccaagtcttcctattgtcttcctcaaggcctctaacttgccaggttttagctatcagtgatattagtaagaatctttttggtcttggccgtgatggaagtctgaaaaacagcatttggcaagggaatgacccaaacagaataattttctatagacaaaatgtgtttaagttgatgaatgaaagatgtgaatgctcatgctaggagaaggggaaaagcattggtatttcccttaaagagaccataccagggtattttatttcctgcaagtggtttaattttgtacattgcttctctgctcacagaatgttctctgtctgtcataataaaggagagccttttcattgaaatagacctctgaatctgttttagcgactgcagtgacagtctgtatgtatctgaaagaatgagaggcataagacacctacacatgttcacatctagggtagtattttcaaaaaatggagttactttgaatccccgatcgtctctttcttttactcaatttcaagttaatatctaatgtaaaacttttataaatagcaaagagacttatacttctctagctttgcaatatttagtcttgctttttcttgttggcacggtgtgccctttaccaaatgatccatccaggtgattgatactaaaacatctcattgatttcaagtttacgtgtctagatattagatcctagaaatgagttgttaataaatatcagctttacatcaagagtttaacagaaacatattcctgaacaaatttccattgccttctaaaagggttatttcttggtctgcagagctgctaatctgtaggttgcattcagtctaggctatcagaatagggcaccccatgggacttgatgatagtattgtcacttagatggcaaacaaggcatgaaataccttttcatagaactaaacaccctcaaatggggacatgaaaccctgtacctctgggcacagtcaaaagttgctgtattaagtcatgtgtttccggtacttctgggctcattaacccacaggttgtttcttgctcccagggatcattctttttggtccaaaactaaataaaaaaaatagatagatcttatggattgatgtgaatgttgaaacagaagctctactactaaaatagtggttcataattaataatcccttgatctttactttgtttttttcctaaggggcagataagaaagcaagtacaaagcaaacttaacactttggcagaatgtaatgtatctgactttctaaaattctgtatgccagaataactggctgtttcccattccttgctcttgatatacagccaacagcctagccaggagccatgtcgaaaaggaggggaggcactcagggcagtggtttttcatggcctcattctttatagtacaatagttagtgtcccactattgtacttgtggaatgactctgaaattgtcacaccatttatgtgtaagaattgctacttctctttatttctccaattcaagcttaagttttcctgaagtttccccaccttctggagtggcaggaaatttagcaatttccttttctcataatggagctatatatggttccccagctagccacgacagaaaaacgtcgggatgaggatggttcttcagtcatggtggagacatattttctgtgggtcttttggctgtagtgctttgggccatgccctgtgttgtctgtttgaagtactcccactccaggtgtgttcagtgatgtgtggtcagcaacgctccctctgaccacgagacagcttctgcaaacatcttctccatcctgtgtgcggcatgaagccagagcactggactgtgctaccttgatatttgctgtgggttgaattgagtcccccaaaaggatatgtcaaagaagtcctaatcccttgttcctgtgagtgtgaccttatttggaaggaggttctttgcagatgtgattaaaatggaagctaagatggggccattcataagatggagagtattgtgggtcctcaatccaatatgactggtgttctcaaaagaaaagaaggtaaacacagagacaggcacagagaagagagtgccatgagaagatatggacacacacagggaaaaatgccacgtgaaggcagagacagaggctggagtgatgcatctacaagccaagatatgccaaggatcactggcgacatcagaagctaagagaaagtaatggaaccaattctggagctttcagagagagcattgctctgctcatgtcttgatttgagacttctggtctccagaactgtgaaaaataaatttctgttgttttaaaccacccagtttgttatggcaaaccctaggaatataatatagttcccttctgccctggtatagttccttacatctttctcacccaaagacgtgactaggatcatttaacctaattcccctctgttgagtatttgagaacataatgagaaccttcctaggactggagaagataaagaaaatgctacttcaattttatatttttcttgttatctcaccctgctaagcttacattttcaggaggcaagtaggtattgacagttcccaaggtcaaacttcctggcctcctgactttgttcactctggcatattcttcatgtagaatgtctcttagaacacaggcttttcaattattttcagtaaatgtttactgagtacctcccatgtgcaaggcaatgggaaaagatagtctagatagtcttagtcttcaatgagccaacaatccagagcgacatatagagttatgtaaatatatttaccaagtgttagaggagatcggtgaaggtgtgaatagtttttataaggcaaaaggagtggtggtgtcataaaaatctttacctctaagggttattttgaactgtgtcttcaaggatagggaagattatatcaggccaattaggcaaggacatcataggacaagggaatattatgataaattacatggtaggtttgaaaagaggggttggcatgcatgattaaattataggtggggtgaaaaaatggtagtaagtgagaaaaaggtgaattaagatcaaattgtgaaaaatttgtgagtgcctacaatgggccaggtcctcagctaattatttttaatacattgtcttgtcaggtctgagaggtaaatagttgcattacatagtggataaacctgaaaataaaatgacatgagtaatttgttcaagaaattcagatggcaggtagtcaaggccagagttcaagcttggcataagtcccaagcccctgttcttctctgtacaccttgctgcaaaagtaaatggggaatgcttcagggctcttgagaaaggtagtggcaatgggttggcccaggtggaggattcactggactttagaggttatatgcagagggctgtggcaaaacaggaagaaggtgatttgggatttaaaaagaggaatcctgttggaaaggaggggccatatgtacttaggtttgatgatcaattaattgattgatggttgaagggaataagaaaatagtgcaatgactgtaaggttctttgtttgagtaatgatttgaggatggtgccattaccccaaggtgaattagagacaggaacaacacgttcttgggaaaagataatgagttcgtttttagcttctttaagttttaagcgcctggtagaagatgtccagcagaacattctaaattttggcctggagttcgggagggaagttggggccagagatccatttgtgatttatcaacatggtaggacagccagtgacttttactgaaatacaagtctcatttctgacattccattgcccaagttcctgcaatgattacatgaagctattagggaataaaaaaagacccacgttcttaacatgactttgaggtattgtttgatctgggcctgcctgtgtctccagcctcattttgaggtatattctccttctgtatttcagttctcaaatgtatatgtgaaggtcctttctgacccagttgcccgataccagaatgccttcccaacatacatacacatctgtacacaaatgcatgtgttcacaccaacacacatgtgcaaatctgcacacatacatgcacatctgcacaagcaatagacacatgttcatatgtgtacacatgtgcacacatatgaatagattcatgtgtacacatgtgcacataaatacccatgcctgcacatgcacagatgtgcacatttcatccagtaattccaactaattcctcagattctcatctgaaacgtttttgttatcagggaagtcttctgtgacctcacagtcaaacaagtttccctgttccttctatgccatagcacttattaaattgtgttgagtatttagttttctgtcttattagaatggaagttccatgtcaataggacatgtggaaacatccacatatttcccttcctctggcactctacatggcaaaagtgggcagtagtctttgtatactacaggcacacatgaatgaattcatagacgaatggatgaatgagttaatgaggctatgagtatagatgagatatagtaaacaggtagggggaacacagggcacaggaatatcctccccactccacagtggacttccagcccactcgttctcttctatgataaagactatgactctggtaaactttgaagtctttctttctaacttcttgacctctaaaaggaagttggagttttcattaatgccgtgggtcaggctctgtggaaaatacaagaggaaaaccagacagtcctttctattagtgtctgaattatctcattaattgataccaatgttgaggtaatcaacttctcattaagacttctcattagatggctatttctctcttttaccttctggcagggagtttagagcatttaatcatcactttcctatttatcacttaaaggaaattcacctttcccccagttatcacatcctaatttttctggggtttgtaaaattttaatcttatgatagggcttttttttttttcctttgggtaagcctttagcaattgctatatccaacatttcaaagaagctgtgttttagtggactgaggaatttactcatcaagattttattttgccaacactcattcattgtatggaataataattcggcagttttcatgatatttcatgtctgggcccagttgctcctttggccagaatacactgagactgaaatagcagtttatttcttgcttaagtaatatggttttcttgtgaccaaaagcataggaacattttatttcaccccagacagacacttctcaggtttgtgattttaattataacaaaaactggatgaaaagaatgacttgatcatggcatagatatgccaccatcagaaaaaataatccacagacagatcaatagtatcgttttcatttatgaatactattttaatgtcttatgcacaggtattatctctacaaaccatctcaagccaaaaaaagaacttcttcagtcacacgtgaattgtctacctttccataaaaatgttctgtcaagagctttctgcataaaagagtaaaaattttcaaataacttgtaattttttattttacacaaaatatctgggctaaagaaagtacattaaagcaacttgcatctcaaaacaatacatttctctggttgaagttttagtgaaaatcgatttattcctcctctgagttttacccaatgggtaaagttgtctaaatatgggattccttagaatccatcctccttcccaagcatttccccatgtttccttccacccccaaattcttaccccatttcaggcagagctgagcaaacataagccttctctgaagtattgagggaaagtctgctaaacggctaaactacttaaggagctaacagaaaaggttgtatcagagaaacagtggagaaacacaggtttctaattatatctggcactggagagaatgtcaaaggtactgggcctggggcaggttcacaagagtgaaagtaagagatttaaaataggttctcaactcctgataaaaacacgaatatttatttatttagtctagcttttctttcttctcttatcgttatgattattattactactactacttttctgacttttcttttcctaacctactagtgtttaaacctcccgaagacagaggtcagttctgctttgatcaccactatatactcaacaattaacatatattgggtgccgagtaactgcagagagactgttctctatagttttaaacgttttgaattaatctctccctattctgtcttctagcctcttttcttccccttcagtatggtagcatagactgtcttttccatgttcttgaggtcagtacatttcaggattataatctctcagatagtataatatcagctcataatcttccaacaaaatggccttggatgacggtaggtagcaggatgaagagagtctgcttggactgaaacccaattcaagagttggaacccatgttggcagtatagatgttttatcttgataatatttctttctttcaatgaaatgaaaaagaataagccagaagaactgctttacccaagcccagattcttcaaatgtgctttctcttgattcctgtaggaagacactgaacagaattctgcatttctaagaataaaaaagaaaaaaaagttaagtgcattaaaaaaagagcaaaacaaagaaaaaattaccaaactaataaaatagtacagttggactacaccaaagggaattttcatttgattctacataattacttcaccttactctcctctggacacatcatataatttaaatgaacaaattttaaaaagtatctttctaaaatagccattaatttggggactattatataaattttaccataattgattgtgtttagtacttccctatacagaacattcttttaataagatgactgaaaggcttataaaattcaccaaatagaatctctttatgcatgataactggtggtttcaagcaaaagtatataggagtgaatatttaaaatgaaaacaaccagttaatgaagtatattttgctatttatttccaaataaaaacaagccttggtgtctaagacttagttaactaatttgtgattttttaaaaaaagtatagatgaaaaggtagctaggtagaaatagaaatagcttagaaggctagatacacagatggcttccttatgcagatttaggaagcaaagtaaatttatactaactaaagaatatgaaaggtaaatgacaagctctatgtatcatgactgactatgctaattatagcttataatattctgctggacctaagagccctcctcagctaaaaaacaccataaagttcatttaatacaaccttcatattttactgatgagggtactcaggacttgagagagtagagagcagacacacctacttcctaaagccagtagtgtggtcttctttgaggacattgaagttgagacatgaaggctgagaagtggctgatcatgtgatgagtatgtgaactttgagggggattaatgcttggcagagggtgaaagtggcatcaacaaaattggtaaggcaactggccagactgccagcatcgaaggccatagtaagcaattaagatataattccaaaagctatggaaacattggtgggttttaactgagggaatgatgtaatctgatttatattttgaaagggtactctggttgctttatgaaacacggattgtaagggagggagctagagaggaaaagggaagattacttagaaggcttttaatagggaggttaggagaaagtggaaatattggatgtattttttgggtagtgctaacaacatttgccagtggttcttggatagggaggtagagagagaattaatagaaagggaggaattgagggcatctactttctttttgacttgaaaggctgagtagatgatggtagtgtttgccgagatggagaagactggggtagaaacagaaatatgttttaggttagtatttatattttatttgacttgtattgcctaatccaagtaaaaaaagattaatcctcacctagagccaaatatatattttattttagtcaggaccaatataaatgtgccaaaggaaatgattaaatatggttagtatctattccctatatagtaaacaaaataataatttaattttcacagtggtcagaggccatcttaggaactatatgtgaaggtagaatttgtgaacagggaaggagtagtagctacgtgtcactgtgttttatatgataagtgtgtatatgtatattaatgtgtatggggacagaatgtccctatgaacttaggaaagtgaattcccttgggttagaagacaatgtaaggtagccctgtattttcaagggtgatttttagaaaatcctaatcatttttcctgaagtactttgtgtgaatactcatgaaattatagacagaccaattctcttttgcttagaatgaaaatcatctgttatgccttcatcatcagtgaatgttttgggaacttcaagactatatccatcatccagagttttggcacacacacaaaaacatcgtttgtgctagccttggactttgctacctgacaaatatagtaaagcactcaatggagaaccatacattagctggatatgtaggacatcaaacttaaatgttatgtaatagctatgaagggcacagtttctcttatagttttaaacattaaggagtactgtctgaaacttgaaacttaaaattaaaactagtaaatggcactcttaaactgtccacatccatggtaatcacagttcaatacagcatacttttttgaatgccaccaaatggaataaaatttttcctaaaatgaatgaactctctgcttctagtttaatatagcataacaatacatacatactcaaaaataacttgaagggagaaagaaatttttcctttctagaagaaggggaggcaatttgtgatgcacagtagagggaggagaaatgagagaattaaattttttacgctgctgtcagaaaactgggagaaagcttaaagagaactaatggggagatatcattagagaaaacaaaaactcaaactaaatctctaaatggttgagttggacagcattggagcactcatttcccttgtaatcactctaaaaaataggctactgtctacgatagataatatgacaatttctgttcaggtagagcgtactatttcaatgtccaaagacgttattcttttaagtaatagatgttcagtgaatgttacattggtttttaatggactttccccagttggttgcttatttcctgatatttttatgttgtgtattcagaagagtgtggactggcttcagctaatcctcataaattgtctatccattagcagatttaaactggacttggggctgccatgtttgtggattcagaagtagccttatcaatcaattagccttatcttcttgtaagtttgatgattcactaatcaaacttagaagaactagataattctatttctaatgtttttatttgttgtattctgtagacaaatatttcagaataattttctccaaaagcctgagtaaacaaaggaaaaattttcagcaaaggcagaaaagtttaaaaacttggcaaggaataactcagtatgacaatattggtgaaccttccttttattgtcatacatgaaggaaatgaatatttaaacagattttttccaggcttgtggggatttggcaaccccaggctctgtctgtgataagatcttactggcctgagagtcctgcctagattcattaagaatttctttctgtctctctctttcatacattatatatttttcaggtgaccattttagcaattgtacaagctatttttaatattaaattatgtagcctcagctgcttataaggagagtttaaggagaatattagacatatttataagtatcgtttgtcatgcaagggctaattaaccttgaaaataagcattggcctaccttcccagtacctacaataaagcacactaggccaaatctctatgaggcggtagttttctatttaaaaaataataataataaggtataaaaagttactaacaaccatgcacttgttcccctcaacttaaaagttaaaaaaattagaaaagaaaggcaacatggctaataagatatgtaaattaaaaatttcctactcttctttcatttgtcactatgttttgtttgtaggtagattcaaagaataccatacttgtcatagacaattatttgtattatgttatattattttaatttactcagatctgttgcaatgggaaaaaaattcaggaaaaacaataactatcaataataaatataaaagcatgcattttcgtaacagaaaaactgaagagagttaagacacattgtacgttccaagagggttggaagaacacacataagaaactacaaagagcatctgcgagacggcttgtgtgaactgatggtgtgggccaaccttcaaattgcactgtcctctacaggtcctttctagatccattcctttatcatctcaaatgatgtgcagtaataatgctgcttgcagaatgaactgaattatcatctaccaactaggatgtgagttccatgaggacaccactgtcacttttgtctttttattcattgctttgttccaaaagcttagaatggtgcataccatgtagtagaaacttaataaatacttgctaaatagatggatgcatttggcatttgctgttttgatgacaagtaatatggtctatagtttagttaatatgatgcattaaggtcaactgcctggtttggatcattgttctatagttatgtaaatgttaacatgaggaaaagatgaataaagggtcctgggaattcactatttttgcaagtcttctttcaatgagaaattattattttatttatttatttatttatttatttatttatttttttattttttgagacggagtctcgatcagtcgcccaggctggagtgcagtggtgtgatcttggctcactgcaaactgcacctcccaggttcatgccattctcctgcctcagcctcccaaatagctgggactacaggcacccgccaccacacctggctaattttttgttcttttagtagagatggggtttcaccgtgttagccaggatggtcttgatctcctgacctcgtggtctgcccgcctcggcctcccaaagtgctgggagtacaggcgtgagccactgtgcctagccagaaattattttttaaaaagttttttgggaaattgagaatggagaagggaaaaaggagtaaggacatgaaaggctgaggaccattgactctggaatagtgcaggaagacaaggtatgggcaagaaagagctgatgtgagtgctggcaatttgcctctggaaggccaaatagcatttgactactactcaatctttttggaaaatcttgaattaaaatctcaaatactcactgtccactgtgaaatttcaatttcatcagtattcttttacctgtgctgcttttatctatctgctgatggctgctagtgctagctgcacaaagccctgagttctagaccttctctccctgcttaaagtttattaacaagggctgggcacagtggctcatgcctgtaatcccagcaccttgggaggccgaggcgggcagatcacctgaggtcaggagttcaagaccagcctggtcaacatggtgaaaccccatctctactaaaaatacaaaaattagccaggcgtggtgatgcatgatatagtcccagctaatcgggagactgaggcaggagaatctcttaaacctgggaggtggacgttgcagtgagctgagatcgcaccgtggcactccagcctgggtgatagagagactccatctcaaaaaaaaaaaaaaaagtttattagcaagtataaatgtatcagaacttaacaggtcaatttcttgtattattgtgagactaaaaaaaattgggaaaaaaggaaagctttgaagagaaaaaaatgggtagccatcagaatcattttgtgaaaggaacaaatactaataagttaatctattgttctcaacaacctgttatccataataggaaaggaatccagtatgtgcatgactaagttaactactcaaaactttcaaaaccagaagccaaaagaagttatagtttattttaagcaatatccacaaaacctaatatagtccacttctgagtaatcatttaattatggtattctatcattttatttttaaaaaatatgctgagtacataaacatgactaaaatatcaacacattctttcttcctacacataactattaatcttaaatgttccaagagaagatgtttaaaaagtaaccctttgcagaactagcccttctctctggagctgtaggcctctcttcttcccagccccctccttttcttttcttttatcttactcgtcaccttgcagtcatgagtattgtagcatgtaggagtggactgctgagagaagggaagaaggatgcattttgcattcacttgtacatcagccttgaagcctggctggcggcaatattgtggacaatagatctttcaaacaaatagacccttgtctgttccttccttctgtaattgttggcagagttctttgttatgtgtctggtttcttgaaactttgaatgaataaactaggacacgggattaatgtaaagaactggcatctttgctgacttattcaacagactgtgtgtacatagaaaagagaaataagcactttcagaagtgttgtctgcacatgcctgggattttacaaaatttaaacaatgtgaaatgcagtaccttgaaaaaagccaggctagtctctggactctgtagtttactttctaaataaaaaatatcctattgaccataagcaaatgaacaattcacctgttagcatatggaccaaatataggccaagatatgtagtggtagagttacaagtaaattttttgatgtgaagtgtcatagaatttacagccaaatgaagtgagtacctctttgtagcagggtaatgatgaaaaagattaggcaaagtttaaagttgagacgcagttttcctacctggagagaatggacattgttacctaaaattcacattgtacaatggagtgatacatgagttgttcacagtagaccgacctttctcagcctcagctctgttgacattttcaaataacaacttgctgttagggactgttctgcacattgtaggatgtttagcaccattcctatcttatgcctgctagataccagcagcactccccttccaattgtgcaaataaaaaatgtctccagacattgccaaatgtcctctggaagtcaaaaaagcattcctggttgagaatcattgtactagaccaaggaatggatcatattgaccagaaggaagttgtatattattaaaaaaaattatccaactccagaagaagtatactggggcagtctaacttggggaccttttgaatgtctccaccatgggaacaaaggctaagtaaagcagtggcccattgctcagtccaacagcactcctccatcaattaccccctcttgactttttgtgtctttagtctcttaatcggcctcgacttcttttccttgacctttaaattgtctcctttatcctaaagcaaatcaaaattactcctgataatgcaaaggtataaaattactatgatgtcttcacatcactactaacttttttgaaaagtagtcttcattctctacctctacttcctcactgtctactttctggaatacatcccagtttggttttttccccctatgtcactacttaaagtggctgcccaaatgctacaatccaacttctcaatgatcacattaactgaactttttgtgtacttatctttgacttccatgcaacttttgatactcttaatcaatggttctgaaactttttttgtgcatcaggatcactggtgagttattaatagttaaaatacagatttctgaattcaacacccagagttcctaattccgtcgggctaggatgtagactgaggatttgcatttctaacgagttcccagatactgtccacgctgctagtctgggggatcacaaatcaagagccatgccttgattattctcttcttgagtgcttcagttgacttttacaataccatagtttcctgatcttgacgcttaatgacatttgtagtcacattttctggtttcttctaccctttttctctaaaacagggcaatgttgcccctcagagaacattggtcaatgtctggagatgtgtttagttatcacaaataactaggaggaggggaagaaggaagagaagagggtccactgctactgatgtctagtgggtagaggccaggggtgctgctaaacatcctacagggcacaggacagtattattcacaggacaaagtattattcgtctcaatatgtgaatactgccaagatagagaaacactgctctggatgcaggcattctctccaagtagatatatattctttttttttgttatgagacagggtctcactctgtcacctaggctagagtgcagtagcacaatcatagctcactgcagcctccaggaatcgagacctgttgatattttagtcatgtttatgtactcagcatatttttttaaaataatatgataaaataccataattaaatgattactcaaaagtggtctactatattaggttttgtgtatattacttaaaataaactatcacttctttaggcttctggttttgaaagttttgagtagttaacttagtcatgcacatactggattcctttcctattatggataacaggttgttgagaacaacctggtcaatattttggagagatgaggacttgctatgttgctcaggctggaatcaaactcctgggctcaagcgatgctcccacctcagtctcccaaagtgctgagattacaggtgtgagccatggcacccagcaaagaatggcctttttatcttctcttcagtctatacctctctcttgtcgacctcagacatgcccagcacttcaactctcacacgtctctggaaatgactcccagaggtattatctttaaatacgacattactcttgggtctggcctgaatttgcaactgcctgataaatataagcttaatgagccaccggcatcttaagtttaagatgcgcaaactaggccaggcacggtggctcacgcctgtaatcccagcactttgggaggccacagagggcgaatcacctgaggtcaggattttgagaccagcctgaccaacatggagaaaccccgtctctactaaaaatacaaaattagacagacgtggtggcacatgcctgtaatcccagctacttgggaggctgaggcaggagaatcgcttgaacctgggagacggaggctgcggtcagccgagattgcgccattgcactccagcctgggcaagaagaacgaaactctgtctcaaaaaaaaaaaaaaaagaaaaaaagcccaaactaaacatatccttccagtaagagaatcctttattgccagtaatggtaattatttgataaggtgtgtctctacccccttttgaccttcataacttgtaaaaatggtacaagatgattcttttaagaaaagtataaaatcacatgtatggttcagaaataccactctggcaggaatttgaggaggtgacagatattcaagaaaattgaaagagaaactttccattccatgtgagattatctaacttttgattggccagggagaaatgtgtcttattattccaagtgaaagtaaatgtatctgcctgcctagatctcagcctagtattgattggagaaaatactgatctgatgctttatgcttcgagaaagaaagcatattgagtatatgatcttctcacacatatgatcagtcttttcattagatttgttttaccgtgatgtattttgttcctcaatagaatgccatgtatatgattgttactggtactcatagtaaatctaataatatccaccattttcagagcacttactaagtgtcagaacaagtgctttgcatgccatcttatgtatactaagcctatggggtagattttattattgtacccattatgcacccatggaagctaaagactagagagaatgagggatacacgcaaggtcacctagatcacaactggtataattaggatttgaagacaggctgtttgacacctaagctgatacttccaaagactattccaatagcacaaaattcaattgctgtggggacatggttctcagaacctggtcttcttgaatcactagaccgatcctcctcagaatttaagacctgggtggaaagggaaagaccatccagctcaccccatgtgcctctcaggaatggtgggggttgtcctccattactgaaagaagcagtacagccggctaatggatggagacacaggggagagattttctttgtgggagttcattacagaggcatctgcagacctctaactctctcctgcatgccctttctctttcatagcttccatctctaagctgtaatggatgcaaaattactgcagcattttgttctgccgggctgaccccattacgcatacaccacagtcataaagctctggcttagttactgtttgcatgttcaagactactctgaggcagggaggtgtgaagtttggctacattttcaaacagagtggatgccttcttcattttaaaaacaaggaatccagcctcctttcagagtgaatattgttttgattactgctggactaatccatacttatttaccccttaatgatgatgtttctctggtgtgtgaagggtctttaaataaatgttagggcagtgatgccaggaagtcatcatttcacatgcattagttgcagaagtttgggagacttcatttccaccccaacatcctgttgtcttgataatattttattaagacatagcaaaagatatagcagggtcgttagataatggttaataaaatataagagtttggaaaggtagtgattctcaaaagttattctcagtcttccttcttctccatgccttgtcaaagatttctgcaactttcatctcaccacatctggtgagaatacttatcagagaaagtgagcaaactggttttggtaataattgacatacctttatctactaggagattctgattttaattcattcagtaaaaaaatattctgtttgttctatgcacatttctaacacttgagacatattcaagaataagacacacatagtccttgtcctacagcttacattctggtaatatttgtcagaaagcagtcacatgattatgaaaaggttacccaaatttctgtatattctatagtttatcctatatcttcttccactatttcacacatttcataaaagatctcaacatataaatattgcttttagcctgtgatattgtctccatggagggaaggactcagatggaaataaggtatcacagaagggtgcagagtgccttttcttttaaagtaattgcaaaaataggagttatattggttatcagaacatgtttgtatttcattattaagctggtaaaaagaaccatggatatatggacatgttctggatcctagatacttaatagaaatgatcactagctgtccctaaaggatttttattatacttcctaaaagcatggactatctcttctgaggtatgccccccaaaatgtcagtagcaataaatttgtaagaacatttttaaggcagcacagacaagtgtgatcggtagaagtcatggtgagtgggagtgaggaagggctagtagcaaacaagaaaaagaaaagaaaaaaaagcattttcagtctttggcagcacttctgtctcttccagcatttgtcagaatccagttattaacctgtcagcctcagacagattgaaggagacaccacctttcaaggtgagcccttaagaaaagaaaaataagaaacagtcattgttggggttgacagagacatgatcccaccaaggcctgggctatgcttggagaggaaatgatactcaagcctgagtgtgtgcttaggggtcaagagattaggcttaggggagtagggatatggaagtagtgatagcagtgaataaggaaagctatctgtttgaatttgcttgtgcaaagaggcagaaccatttcaaagatacagggtgcagattttagtgaagatgttagagctgacccctgctgggactgtggcatttcagtagaggaatggtgaatcccttcccagtggggaacacacatcatccacatacatgagggaaaaaaaaaaaaaaaaggaatgactctttttatcaacaaaagcatgcccttatctatgattgtggtgtcattttcttttaacaaacaaggatagtttttaaccttagtttgctcacaaaagcttcagcaaaaaacaagggacatcaaatatttctggatttccatgttctgggcacatagtagggctgtgccttctgaaacttcctgtatagaatggagccacatgatcatttgcaatcaatgagctgtgaaggggaatggcatgtgttccttacaggccaagcatttaagtgttgatgtgagagtcctcagagcacttttttttcttttgcctttgtcatggtgccatggctaccagcaactttcagacagtggccattgcatcaacctcaaccctgaagtgaggaaccgtggcaacatgcaggcaagcctcaagcccgcccacagtagacaaacatatacctttattgttataaaccattttggacttgtttgttactgcagcataatctggctcttatagtggacacatttggttagatacaagtgtaagaagttttattttccttgatgaatagtgggaaagtgtgtatataatattgtaaaccttttttagcacccaaattaacacccctatgtacccaaagtcctatatctgggctgcagtatccccaaagacattttgtttgttttattttagtcctgtaagaattaaagtcaactttttaaaaaaatgcagtgctaagagagacacgacaaaattgagacaatttattagcggattctttcttttctgaggggtctttttgcatgtaggagcagtcattaccatctgtaaggtgtctaaagctcaatttatttaaatcatatatctgaagaccaaaacttttaaaacccaaattttgtttttaaaactttataaaagatggtaaattcctcttcaaaatttaaacttcaactccaaatttagtatgggtgatttctcataacatttcaaataccttttaaaatacataccttttatacttaaacttaaatctatagtaaattatgagtttggttcattttatcattatatctctatgtgtttttgtattttctgaggattatattagattaataccaatgaatctattaaatagttgttgcttctctaatatgaatcaaatctaagctgctgatcaggctgaggtgttgtttttaaatcattaaatttatttattgtgtcaagacataattgcctttcccaaaaagtctaaatgttttcctataatttgctgtctctccacaagtaatacatttttaaaagccatacttggtgagattatatgatccttgttcattattaaatattgccttttatttaacactattaaaaagatatattcttataaacagcttatttaaagtcaggaaccatctggaagtttcatctcccaaaagatgagatgaatccaaatagttctttctctttctagcatgtcaaactaatgtgtcatcctagaatgcatctctgagccccatttcactaggttattaggtgtgaagcccagatctagaccaagcctgtctgctcttggtaagcctctttctttttttcattttttctaatactgtttgatgtatttcctgttatttttatttactgttttctacttatccaatagtaacatggccatgcctatactttattactttgtaaacaagtacctaagtaacagctaaactaaaacatacatgttcatatattttagcattcccctaatcattgaaatcaataacaattcaatatactctattgtattcatatttattttatattaccactatgttttatgtaataatattctgtatattaacttttctgagcatcactatgactttttcacaaacttagcttgttttaatcaacagtaaaaatgaagagtgatgttgttgttagcaatcttatttagtgttcaaattattatcaaatggccagcgagatctcttttaaatgggctccttattctttcagcactttatttgatatttgtggccacatacttgtattttgcaataaaaaaaaatttagattctttgcaattattttcttccgctaagcagaaaatcaacaaaattccagagaaccttgtgcaaatgagtgttgattgtggccatggtgcacctgcactttaagtaataacaaagctgaaaaatatatttcttttagaggtcatgagttcacactgagaagtgtgaactcctcatgagttccatgagaagggcataactttaggtaatttcttgtaagctcattgccactatgtaaaccagcttatgattcttatctagttggtcagtatactataaatatcagtgaatattcagaatagaagctgatagaaaaatcaaaccatagaaaagcagggagagtgtgagaatatattcaccatgtgtacatatatgcccctaaacaaaagcctgaaagtatctactctaaaattgatttatcctcctcactatcctttttaaattttttatattattcaccttttcttctttgaacatattttatttttgtaatgagaatgcaaagatgttaaattttttaaataactaaagaaaccgttccagcaggaaatagcactatgtgttgttcaacatacatagtgaatcttgcatacacagcatattaataaaatctcaaaaattgcttactctttacaagtaggagatattttgctttttgtgtccatactttccctttagaatgaggaggattctaagtaatcttattgtatcacatttctacttcattgcattgctctctaggggggaaattaacagcagaagacttgtcacttgagttctattcatgaccactctactctgagcattacagatggaatgcagcaaagaggagatacaattctaggggaatatgggcccatagatctttcaaaacaaagaagaaaagctttctcacaattgctatagcaaataatgctttccactgctttagagtcatcactgtaagaacatttgatccacaagtgaagaacaggactatattccatgtggcttttcaaggcgactgagagcacctgctccctagaatccttcagccacattgatatgtgtgtcataaaactgtgagatcatgatcccattgatgtgatatgaatcaagaaagccatatgctctttgctggtataaatgatagctgcatgagggcttaccaataagtgaggaatgaaatttgaattttggaaagaagtttgtagctacatgaataccttgcagcctctcttttcaatagtctcaacatttttactgccatgcgatttcttctatagctccatttatatccaacttaaatttcactctaaacattttcattttttattttttattagacaattctcttttgattatctcgttttataaaatggcacatgggtttatcacttggagacaaagaagcaataccctatatgctgtgtgtgaactgagcaatacgttcagtgaccattaactgacagacttcacaagaactcatgagattggtcaatgatcacgaagtgcatctgtaattcatgtagctaatgtggactgaagaactaagagcaaaacatacacttcgtgcaaatacccacagttaatatagcatagaaacagaaatttaagctctgttgttagaaggctggagttatgaaccaaaccatagtaactaaaattcatgcatattacaaccaagcaaaatgcagactacctgtgtgtatatgtacatttagtatttttttgtttgtttgtttttaactttgtagcttcagcacaccatgccacaaactttgtgccttataataccttggctgaatatcttctcagaggatgatcattcacttttacctttgtttgccaacttattccactgcggctctttttgtcttgcaatgcattctgtgtactggtgaagaagttttgaccacgaatagctgacaaatatgtgcaggtggtcatgcacagaagcagaaagaaaattcctctgtggttgttaacgtgaaggttttccaggggcttggggcactggttaaggaaacagattaatgagcagcaaacaggaattgatgggagtcctctgacattttgaggatatccctacacatcactgcaggctgagggaagcttggctgaaagaaactggccagaggcatgttctgactttggctgacttggaaagaatggcagtgctattaacaatgtacacatagtgggagaatttcctctcagtggaatgatgctttaatggtcccatataatgctaatgccattagcactctcatttccagatactacatgggatacataagtagaagagttaggaatcgttttctgaaaagacattctaatattatttggatattaaataaaaataaatacctctgttaagatattcagacccagtattagtgtaagtgggtacagtagaaagaggccttaacttggaatatgtagtgattaggtttaactcacagccctgccaattattagctgtgtttgcccattcatttattcatacatttgtatacattcttttattttcttacaaatctttaccaagtgcctattacgtgccagatcccacaccaggctttacgcagtcagggtcaaatcacttcacctcttcaagtttctcacctgtaaaattctgagacttttttgaaatctattttttaaaaaatacatacttgattcaaacagcagctttataatttgaaaacctctattttactcctgtttttctttggaggccaaaggtgactctaaataatttcatgaaagtaatgaaaatataatctttagtgattaacttcagaattaagagagtaaaaagtatttttcaattcatcttcagcttatgccatcacctcagcaagaacaatgagtgtgcaacaattcactgttttgtaggatgctaattagagggtagactcctcatggaaaaagcccaagcctctggttgactcctgtccatccagatggagctacaatgaaatgattttctatggctgtgtgtgcgtgtgtgtgtgcgcgcgtgtgtgcgtgcgcgcacacacacacacaagcctgggaaggaagagccccccactctgtccattattcaactcaatgtttactgtcaagatgagttttccaatttccattgtttcccctaaattgagtctctcacatagagtttagagctggtatgtctgctaggaaatagctatataataaaacatccatataatagcactataattcatccagttattcattccttccctgaaaaataggacctaaaatgcatcattgtgtgtaggtttcaattaaattcagaggacagttattgactgactactgcatgcaagctggctggactgagagtattgagatggataagaaactgtcccctctcaaggagcttaaaatctagaggaaagagaggtgtataaaatatataattgaaaatgtttgctgtaatttctaagagaacacacctggggatgtgaaaatggacagaagggaggatttagctctatcttggaggctgggatataagtcagggaaagcatttcagtggagattacgcttaaagtgggagtactgtatacatgaataagcagagcaggccaggtaagcaaagttgtggttggggaaagatgcattccagacagccagaatgttttgcctcattggaagattgtttttctcacccttagcaccctctgcttattcgtctctttgtttttaaccatttctaagttgtatcttaagactctaatcaatgtaatgggatggctgtatccctccccactccatcccatatcacaccaccgaatgagcaacaaatcttggcgtctgaaaaatgtagcacctgacgccaatcaaaacttctgctcacagctctaatgtaggtctgggggcttttctgtgttacttgaaactagtattgattgcatcagcgctcaatataatgccccagtagtcatccttgctgctttagctgaggaacaaaaggtaaaatcaagctaaatgaaatgaggtaaatgtaggaccagaaaaaccagaagtcttcattgcctgctctcaggcatcatcaaaacaaaaggctctctggctggcaaggtcagtaagggagacgagagaggataggaatactcagagacaatatgttgccctgctaagagcaggtcatggtccttaatgtaagccatgtcatttgcttacagtctttattatttaatctctgacagatggaaattggttgagaacaggtaatggtacagagtcttctgtgtgtgcttgcatgccagtgagatctactgggagaattaacttctactctcccagcacaatcggtggtcattttgagtgaccacatcatttatctccaaaccaggacaccttggagaacacaagaggatactgttaaataaacgtgagtgtataataaacacacagtgggacttccccaggcaaacagggactcttaggggatgtatgatcaccttaacatgttttctgtctggagggaaatttccaaggagaaatataagtaatacctggaacatgactctagaggtaggctaagactgcagggtattaatcaatgtataagtttataagtttataagcatgtgaaaacttcaaatttcagcaatgattctctaaattttttgctgagacagataaaatagctgtttttttttctcacacagagtacattctcataggaatatctgaattacatgcagttcctagaaagcaagctataattacattattcaagaaaacactgcagttcaggctaatgtttttgtatatttgttttgtacattttgtacatgtttttgtaatgtgtttatacatatgtacatagaaggctttacatttggtgatcagcatttaaattatttacgtacttaaactattacaaatacactacttggcacactctttccccagatcttcatctggctgtcccttttcatcttctagatctcgactcaacatctccttcttaggccatttctgaccactataactgatccctgtcacgttctatcataatgtccttttgccattttcttagcacttattagtgtataaaattatcttctgtatttagctgtgagctttcctcactagaatgaaagaaattatggacaatagttccacctaccttgttcagtagtacacctccagcactttgaaacctgtggggaaacaacaggtactcaacagatagttgttcattggatggactgatgggaaataggccatcttgtctttattgaacaacaacttttgcaggaagcattctcctcccttcatgatttttgtgcataggtaagcacctgcttagacaactccagttcctgctctcacacttcaccactggattgttgcaatgcagtcttaaatagccctcgaatatggactcaaccacatcttgcaacaagattgtcatcagcacccctttcactatgcttggcctctatatactttactcttagccttctcctgaattagtcttagcccagtaacatcttgtgctgatgtcagtcttctggttgaccaagtaaacgtattttttcatttcctctttttttgctcgtctttttcatctctcgctgatgattgtcaactgcaatgacaccgtacttttatacactgcatgatgtatacttactcagaatttttcttattgccaaataaattatttcatacgcttatgcaactcctttcgttaaaagcatgttttctactttgttctcattattaacagaactattttttcagttatcttactcattgcttttgcactgattggacatcacagcattcaaaatgttcacaaagtacctaaaaaattgaacacagaggcctctgtggttagggtgactgaaaaacttaactggatttttaagtcagtctaattttaattaacttaaactttttttttccatagttcagagcatttatttatttttttaaatttattattattatactttaagttttagggtacatgtgcacaatgtgcaggttagttacctatgtatacatgtgccgtgctggtgcgctgcacccactaactcgtcatctagcattaggtatatctcccaatgctatccctcccccccgccccaccccacgaccgtccccagagtgtgatgttccccttcctgtgtccatgtgttctcattgttcaattcccacctatgagtgagaatatgcggtgtttggttttttgttcttgcgatagtttactgagaatgatgatttccaatttcatccatgtccctacaaaggacatgaactcatcattttttatggctgcatagtgttccatggtctatgtgtgccacattttcttaatccagtctatcattgttggacatttgggttggttccaagtctttgctgttgtgaataatgccgcaataaacatacgtgtgcatgtgtctttatagcagcatgatttatagtcctttgggtatatacccagtaatgggatggctgggtcaaatggtatttctagttctggatccctgaggaatcgccacactgacttccacaatggttgaactagtttacagtcccaccaacagtgtaaaagtcttcctatttctccacatcctctccagcacctgttgtttcctgactttttaatgattgccattgtaactggtgtgagatggtatctcattgtggttttgatttgcatttctctgttggccagtgatggtgagcattttttcatgtgttttttggctgcataaatgtcttcttttgagaagtgtctgttcatgtcctttgcccactttttgatgggattgtttgtttttttcttgtaaatttgtttgagttcattgtagattctggatattagccctttgtcagatgagtaggttgcgaaaattttctcccattttgtgggttgcccgttcactctgatcgtagtttcttttgctgtgcagaagctctttagtttaattagatcccatttgtcaattttggctttggttgccattgcttttggtgttttagacatgaagtcctcacccatgcctatgtcctgaatggtaatacctaggttttcttctagggtttttatggttttagttctaacgtttaagtctttaatccatcttgaattgatttttgtataaggtgtaaggaagggatccagtttcagctttctacatatggctagccagttttcccagcaccatttattaaacagggaatcctttccccattgcttgtttttctcaggtttgtcaaaaatcagatagttgtagatatgcggcgttatttctgagggctctgttctgttccattgatctataactctgttttggtaccagtaccatgctgttttggttaccttaggcttgtagtatagtttgaagtcaggtagtgtgatgcctccagctttgttcttttggcttaggattgacttggcgatgcaggctcttttttggttccatatgaactttaaagtagttttttccaattctgtgaagaaagtcattggtagctttatggggatggtattgaatctgtaaattaccttgggcagtatggccattttcacgatattgattcttcctaccgatgagcatggaatgttcttccatttgtttgtatcctcttttatttccttgagcagtggtttgtagttctccttgaagaggtccttcacatcccttgtaagttggattcctaagtattttattctctttgaagcaattgtgaatgggagttcactcatgatttggctctctgtttgtctgttgttggtgtataagaatgcttgtgatttttgtacattgattttgtatcctgagactttgctgaagttgcttatcagctgaaggagattttgggctgagacagtggggttttctagatatacaatcatgtcatctgcaaacagggacaatttgacttcctcttttcctaattgaataccctttatttccttctcctgcctaattgccctggccagaacttccaacactatgttgaataggagtggtgagagagggcatccctgtcttgtgccagttttcaaagggaatgcttccagtttttgcccattcagtatgatattggctgtgggtttgtcatagatagctcttattattttgagatacgtcccatcaatacctaatttattgagagtttttagcatgaagcgttgttgaattttgtcaaaggccttttctgcatctattgagataatcatgtggtttttgtctttggttctgtttatatgctggattacatttattgatttgtgtatattgaaccagccttgtatcccagggatgaagcccacttgatcatggtggataagctttttgatgtgctgctggattcggtttgccagtattttattgaggatttttgcatcaatgttcatcaaggatattggtctaaaattctcttttttgattgtgtctctgctgggctttggtatcaggatgatgctggcctcataaaatgagttagggaggattccctctttttctattgattggaatagtttcagaaggaatggtaccaattcctccttgtacctctggtagaattcggctgtgaatccatctggtcctggactctttttggttggtaagctattgattattgccacaatttcagctcctgttattggtctattcagagattcaacttcttcctggtttagtcttgggagagtgtatgtgtcgaggaatttatccatttcttctagattttctagtttatttgcatagaagtgtttgtagtattctctgatggtagtttgtatttctgtgggatcggtggagatatcccctttatcattttttattgcgtctatttgattcttctctctttttttctttattaatcttgctagcagtctatcaattttgttgatcctttcaaaaaacgagctcctggattcattaattttttggagggttttttgtgtctctatttccttcagttctgctctgattttagttatttcttgccttcttctagcttttgaatgtgtttgctcttgcttttctagttcttttaattgtgatgttagggtgtcaattttggatctttcctgctttctcttgtgggcatttagtgctataaatttccctctacacactgctttgaatgcgtcccagagattctggtatgttgtgtctttgttctcgttggtttcaaagaacatgtttatttctgccttcatttcgttatgtacccagtagtcattcaggagcagattgttcagtttccatgtagttgagcggttttgagtgagattcttaatcctgagttctagtttgattgcactgtggtctgagagatagtttgttataatttctgttcttttacatttgctgaggagagctttacttccaagtatgtggtcaattttggaataggtgtggtgtggtgctgaaaaaaatgtctattctgttgatttggggtggagagttctgtagatgtctattaggtccgcttggtgcagagctgagttcaattcctgggtatccttgttgactttctgtctcgttgatctgtctaatgttgacagtggggtgttaaagtctcccattattattgtgtgggagtctaagtctctttgtaggtcactcaggacttgctttatgaatctgggtgctcctgtattgggtgcatatatatttaggatagttagctcttcttgttgaattgatccctttaccattatgtaatggccttctttgtctcttttgatttttgttggtttaaagtctgttttatcagagactaggattgcaacccctgcctttttttgttttccatttgcttggtagatcttccttcatcctattattttgagcctatgtgtgtctctgcacgtgagatgggtttcctgaatacagcacactgatgggtcttgactctttatccaatttgccagtctgtgtcttttaattggagcatttagtccatttacatttaaagttaatattgttatgtgtgaatttgatcctgtcattatgatgttagctcgttattttgttcattagttgatgcagtttcttcctagtctcgatggtctttacattttggcatgattttgcagcggctggtatcagttgttcctttccatgtttagcacttccttcaggagctcttttagggcaggcctggtggtgacaaaatctctcagcatttgcttgtctgtaacgtattttatttctccttcacttatgaagcttagtttggctggatatgaaattctgggttgaaaattcttttctttaagaatgttgaatattggcccccactctcttctggcttgtagagtttctgccgagagatcagctgttagtctgatgggcttccctttgtgggtaacccgacctttctctctggctgcccttaacattttttccatcatttcaactttggtgaatctgacaattatgtgtcttggagttgctcttctcgaggagtacctttgtggcgttctctgtatttcctgaatctgaacgttgggctgccttgctagattggggaagttttcctggataatatcctgcagagtgttttccaacttggttccattctccccgtcactttcaggtacaccaatcagacgtagatttggtcttttcacatagtcccatatttcttggaggctttgctcatttctttttattcttttttctctaaacttcccttctcgcttcatttcattcacttcatcttccatcgctgataccctttcttccagttgatcgcatcggctcctgaggcttctgcattcttcacgtagttctcgagccttggctttcagctccatcagctcctttaaaaacttctctgtaatggttattctagttatatattcttctaaactttttcaaggttttcaacttctttgcctttggtttgaatttcctcccgtagctcagagtaatttgatcgtctgaagccttcttctctcagctcatcaaagtcattctccgtccagctttgttccattgctggtgaggaactgcgttcctttggaggaggagaggtgctctgctttttagagtttccagtttttctgctctgttttttccccatctttgtggttttatctacttttggtctttgatgatggtgatgtacagatgggtttttcgtgtggatgtcctttctgtttgttagttttccttctaacagacaggaccctcagctgcaggtctgttggagtacccagccgtgtgaggtgtcagtctgcccctgctggggggtgcctcccagttaggctgcttgggggtcaggggtcagggacccatttgagggggcagtctgcccgttttcagatctctagctgcatgctgggagaaccactgctctcttccaagctgtcagacagggtcatttaagtctgcagaggttactgctgtctttttgtttgtctgtgccctgcccccagaggtggagcctacagaggcaggcaggcctccttgagctgtggttggctccacccagttggagcttcctggctgctttgtttacctaagcaagcctgggcaatggcgagtgcccctcccccagccttgctgccaccttgcagtttgatctcagactgctgtgctagcaatcagagagactccgtgggcgtaggaccctctgagccaggtgtgggatataatctcctggtgtgccgttttttaagcctgtcggaaaaacacagtattcgggtgggagtgacccgattttccaggtgctgtctgtcacccctttctttgactaggaaagggaactccctgaccccttgcgcttcccgagtgaggcaatgcctcgccctgcttcagctcacgcacggtgcgtgcacccactgacctgcgcgcactgtctggcactccctagtgagatgaacctggtacctcagatggaaatgcagaaattacccgtcttctgcgttgctcacgctgggagctgtagaccagagctgttcctattccgccatcttggctcctccaacttaaacttaactttaaaaattgatattcaattcagtcactggaagacataagtatgtgtgaaactactcggatatatgaattactttttcagttgtaagttttgtgaaatgtatatacagataaaatatttctagtaaaaacagtgtcagaattgagatgtgctgtaagtataaaatacacatcaaattttgaagacttcatatgggaaataggatgtaaaatagcacatttacaattttaaattttgatcacattttgaagtaatattttgaatatattgggttaagttaaatatattattaaagttaattatacctatttctccttttttggggtggctgctagaaaatttaaaattatatatttgctttgcattatattcctcttggactgtgttggcctagatcgtttattagcttaggcaacataatgcaaatttacattaactttatttggtcttcatcatattaataataaaagcaaaacaaaacaagaaaccaccaggtgctaatagtcacaggctgagttccctaggaacagactctgagattgagtttagcatgccacataatttttaaggagttccctggggaaggaagtaggattgagcagagagaagttgagctgcgatgcaggcccaacaatgggctcagctaaccccacgaggagctctgacactaacatgacctttcagtttgtcctgagttgggccaagatggcaaagtctttctaccccatcatcaacaggtcattgaatgcgggtcactctgggaagagcatgatcttaggcaagatggtgctctgtgtctgaggccaaccctgaaggcgctggcagctgaaggctgtctatggacagcactctttgcagctcaggtcaggcagtaagtctttagttgcagggtgagctgggcagcacattacagtgtctactatactaacattttttgttgaagatttcccatgaagatattgattattgtctttttcagtttttaatcagatgcattggctaatacctgtttgtagctgaagctaagtctgtcctcttaggccatggtgtgaattgtgtgtttccctttcttccttcatctctggcttagctcctttcattaccttcatggcccctctagaagtttatgttaggtttttaaggccagaccagactgacttgagcccagccgtaattggagaccagattcaaggctctctcttggtggcaggtgacattagtcagactttattcttatctatgaaagttcataagtaagtgagcttttgtgtttttctgcttaactctcattactacctgttatctctttgaagacaagggatatgtaaaggtacatatatgtgtatagattgtgtatgtgtttgagtatgtatgtatgctttaagccttgttccaagattggtttatattagaaactaaacaaatacagcccagcacggtggctcatgcctgtaatcccagcactttgggaggccgaggcgggtggatcacgaggtcaggggatcgagactatcctggctaacatggtgaaatcctgtctctactaaaaatacaaaaaaaaaattaggtgggcgtggtggtgggcgcctgtagtcccagctactcgggaggctgaggcaggagaatggcgtgaacccaggaggtggagcttgcagtgagcagagatcgtgctgctgcactccagcttgggcgacagagcaagattccatctcaaaaaaaagaaaaaaaaaaaaaaggaaagaaaaaagaaactgaacaaatacgttatttactgaaggagtaaatatgtgtgacaaccagtggtgtcctcattccgtatctccatcttcagagaatgcttgtgtgccttcaaatttatgacattttcctctcaccccttagtggtgaagaaactgaaatattgaccccatccccaaaaattaataagttaagtgtaagtggtacctgtggtccatttgaaagggaatatctgaatggaatgggaggacagccacctattctcagcaggcagaaagggtacttgtcaacaggtaatatgggaaagctaagaaagattaagactttatttttccctatagtctgcctttctgtgttcccaattctttacactgctgtgtaatgttatggaatatgattctcaattaggaaacttgaacgaagacaaaaaaaatggtaagagactatcttctaaatatatccttagttcttcaggcagcaatttaatttcagttaaaagaaagaacaaaggcatgtcaatgttttggactgaggctaaccgaggactttcactggcactctttttagagctagaccattggggaagttgcagtgttacataatgctatgcttctcattgccatagagaagcagcagctgctttgagactttagaaaatcagcagcgacttgaactctgtgttgcttgtgtccagaaaattccaggcactttgtcaatttttttcttcattttcaaattatccttttgaggaaaatataaaggagtaatcccattatctctattttagagataattcagctgagtttcaagaggtttgttgtcttgcttcaagttgtccattagcagaacgaagaacaaaatcttgctttctgtctttcccagactgattctctattgtagcttctctttggctgttgatataatatcaaatattttgtatgtatgtgaaaaatttgaaatttcatttatttcactagtttaccaaatccctgcctttcactgctgaccaaggttagaactaatataaaactatttcctttagaatgcttagtgaatattttttgccactaaggctaaaacaccactgataatttttactctctcttgtatatgtttaaataacagaatagaaaggaatatgggaggtacatgatatggaatgagacacatcttgactaaaatattttagtttagagcaaattttctctgatcatagttattcaaaggatctgtttatttgtatgtggcatgatggtgtgtgtaacctcacaaacaaatgcagagcctgggaataagaaagatgacttatggtttcacctccaagattttgactctgaaaaagtcatagaacctctccctttcatagtttctctccctctctctttcatataaatatatatatttcacaataattacttgaataaatcctaggtacctctcctaaagagttttgaaaaataaacacatagatatgaagaaagatggcccaatataaaccaacagtggtcctactatccctgtcctctatgggcttgctaagcaataccccaaggtaactttcaagctgactttgatgtgaatgcccaggttcacgtataggagtaacatagaccactaagaggggtttcttgacaatccacagtatctctctcccccttacaaaagatagtttttaacatcaagaggacagttgttgactctcatttgaattattaaaccaaataagtggctgttaaaggagcaaagatctgaataataatcagttatcatttgcagagataattcaaatgatagctaattattgggcaggcactctacataaattatttcttttcattcctatgagatgggtactttatgaggaaagagagaggttcagagaaggcatgtcagttttctaagatcacacagctcattgttgactgagccttgacatgaaactacagctatgtttaaaaccagtgctatttctagtgtactatcctgcttccttgtaattatccaacacttttcttctttttctcctttttaaaaatcaggtagtatctgattgactttgtctttcttttttgccaagggtacactcaccaactgctgtccagagttaaatttatagtcacaaagcaagagaaaagtctttgtttccaagccaatgggctgggtttccagaggcataaatcctaggaattagtaatatcccatataaaatcactgaaggttggtgcctatggttatgtcagtggcctctatgatactccctaaaggcgtaatttattccacagtccctagacacattcgttcatgttctttgaaacagggcacacttgcctttcccagaaatttttcaaccaaacaggactaggacatagatcaaggtctgtcagcctatgctcaaagtgtcctctgcagactttgttgccactaaactagaaataatccatagtttctcctgtttccttttccgttaatgaccaactttatatacactcaaaatgaataagtgatacggtttgttcttctcctctacttctctgtttcccaaagtaatttgcaagttagaagaggaaatccattaggagaagctgaatggattaaaagataataggatttggagaacaggacccagtgaatcacaaattcattacattcacagctgacaattgctaagtcccggcctgctcctctcacaatggggccaaggtctgtgcagcatgctggtgtgcctggtgaaaggagaaaatgagcttcataaatacaaacgttagagtcaatcttatgttccccagggactgccagtactttacttggcaagaatagaaaaggaattcttaaggatataaaggcaaaaacgaacactgtaaaacacaaaccacaacaatggaaaactatagagccttgcttccaaagcttagtcatccatacttttctgaaatgccaggaattgggatatggaaaagagctcagaaaactacaggaggcatccatggaacaaccacagaattctcattctggaaagctttggcagggctatgttctcatcatttcactttaatcaccttttaccccttggggccatttgaggaccatgaaattctaagaatgggtagaaaatactcccccaaccaaataagaaataagattcttttgtttctatatgtcctggattctgcatgctgcctgctcggagaggagagccttacactggagtttgcaggcatttgctgctgtctcaataggtagatcttcagttaggtcccagcttcatgccatctgttatttctaaagtattttggccttcagctggaggaaggtgacaggagagtgttctgttcctgcagaaaatttgcttgtcatcagagtaactgtgtactgttgaaacagctactgcctacatttcactgcctcttgaaagctagcattttggtgtgaatcaattatgaaaagtgatgcacactgccccaacacgcacacatacacatacaccccgcctaaaaacctgagacataaacaatgtctagaattgtgggcaatcatgcagagcccttcaaacaatattaaaatccagccacttgtaaagagtgagtaataaaataagtttagggttatataaattgagtctaataaaataattcagattcctatggtacattacagttttatagtagtgcctttattttctcttgttcttctacaaatgcctttttgaatatttattcattacccatttcctggataaagatagtaaggcttagaccttttaccaggatatcatagcttaaaaaatgacagagctatttaattcatatttaaaatcatattttttcttttgcatttttctacttcctggcatatgtttttttctctgatattagggtataggacaggacgaggaataattaaagtccctccaaagattaggtcagaaagggaccataaaagcttttccattaggaagctggctttggcgtttcattgtcattggagaaggcccatctgtacctatggcacgtgttatgctaggaaaatacctcctgaatccttttgtagaaagcaataagatagcatttctcagaaagaaaatgctttgctaagcaaatactttgaaaaaaacaataaatgattttttaaatggcattacaatgttctttgaataggacatgggaacaggaatcaaacttggatatattgtattttcatcttattttatttcatttttattagtgacagggttttgctctgtcacccaggctgaagtatagtagcatgataatagctcactgcagccttgaccttccaggctcatgatccttacgcctcatcctcctgagtagctgggaccacaggcatgtgccaccatgcctggctaatgccttttaagtttggtatggacaaggtctcactgtattgcccagactgctttctaactcttgggcacaagtgatccctccaccttggcttcccaaagtgctaggatgagaggtgttattgcatatttttacaagtatcagacatgtatgttctgaaaggcactagaatcattgaaaataagtcactgtgaagtgcaatgactcttgaagataggggatagcagaagtgtgaaactttgtaggctaatcattatggccaatgcctaattaggatttatagtaccaaggcctgaccaaagtcataaattatcagacaaaattattggacagaaagtgaatgactgcatatcttgttaaaatcactagggaacttaggcagaaggtaatgactgaaatgagaacttgcctgaaacatcaggctaaaaatagttcttgatatatgaagatgatctgaaaaatgagccaaaatttgtgttgcaaaacagcaattcaagaattcaatcttaaaacattgcctatttttttcttcagaaaacaggatacaaaagtcagtgtgaatgagcaaagccattgagttgctcccaaagcagaagaaattagacaaagctattatggaggagatggggatggatttccacaagagagggcaacctctatgtgaggggtaatttaatgaaaaatttgcaggtgatgcacctgtcttttcaaagttcttttcatccctgcaatttcatactttttcaccttcaaggccaatggctttgtcagtgctgcctgaattgtgcctttgaatgagtaatgacagatttgaaataagaacattggagcattttaagtgtccagtaatatttgctcctggatctactttgaatggtgggtgtgtgatgactggtctccatgaatgggatcatctaatgccttttaaaaattaaagacatagtgtcatttggactttttatgatgcagtactatcttgtcacagaagacttcaggatttctcttggttagcaagtcaacagagacctgtgtatctaggcctgcatatatgcatgcatgttgttacttgatatattcggttataagaaaaggaagtcagtcctagtaaataacaccatccatatgagatttatgggtttcacttataaatattaaattaataaataaaatattatcctatcatacttagtaacaaaggtataaggctacaatattacacctgtcctgtaacttcacagatatctaatgaatatctagaaaacatctctgacttgctgcgagtgtgtcactaaagccctacattgaccatatatgtctttattctctatctgataatgttgcaactttcacattatttttgaaagttcttaattggtgattaaattcctgagaatttccagtaatgcataccaaatgtcctgagactttttagacataaatctgactcaccttcaaaatcaaaacaaaaaatcagtattactatgatttcaagtcataatctgaatttaactccacctttaaaattaaatgctgccaggatcacatgctcaaaggctttcttggaaatatggcttatacaaatggcatatgcatatatatatatatatatcatatacatggcatatatacatatatatgagatatatatgtatataatgtatatgtatatataaaactggcaacagaaacacaggaaatgatatgaaaaaattattttgttcatttggaacgctgtatttgttgtcatttttgaagacaataaaattgtcattcgaaccaaacccatttgtttcattatctattaatttctatctcttcacactgcttggattggagatagcaaacaggccatgaaaacaccttgggaaaataattcttgcacattctctaacaaaactggaaaaattactgatagattcttggtttggtcatatggtgcttacatgaactggagaactttgatttgagctagttcaaattttaacacactatccttacatacctacgtttgagagactgttatatgggatttgagagattttgaaaacatggcctttttcttgccgtttgtgagcaaggagagatgtaagctgtttacctctgtacccagcaaaataccttccaatgaggttagaatcactaggacttttcttaatgttggttcacccccattatacctcctgagtataagtggataatgatttttttaaatcataagagcgccatgttgcaattgttattatcaccccacctcactgtgtgtgtgtgtgtgtgtgtgtgtgtgtgtgtgtgtgaagttaaatgatctttaatagtggtttgttaccaaaaaatccatgtaagctcaagtcacctaaataaaaactactgtataagaaggaggcacaagtatggaaaacatataggaatacaagaaatgtttacttttggcccttttcctcttttaggccatttccttcctttccctctaccttggacagctagtttcaataaacaaaaccttgtccttattactaccacttttagaatgccttaacttgcccttaatgcctagcctttcaacaggtggattcttgtgtgtcctgaataaacatacaaacacatagaaacacacatacacaatacaaatgtatatatattttgtatagtatatctgtatatatttaggtacatattttaaaaacaaacacattcaagtaagagaaacattgagtggtaaaagaaaaattagcaaactgatataaggtgtagcagtcttacttatcaaatggaacaggtgtctttttcaaatttagttggtgcctttaattggccatttattcctgagtgtgttgggcgtagtaataaatgatatgacaacacagctcatgccagtggtggacttctacaaccagtggaatagtcaagaaaggtcaagctgtctccattgatttgaaagtagattgtacctacttatcacaagcaccttagttttcctttccttcttttctatgaaggattgtccccttgtccatatcacatgttatctatcatccttaatgtcactaataaattagattattcatggaatgtgcttagccctgtgtctggctccttgtaagcagttgataaatgtaagctgctatagttatcacactttgatccttaccacgtttccttgatatattgagggcaaataattgaatctgcattttattaaaagaacactgagactaatggaggtgaagaggttacctgacttctctttggctcaggatcagtgaacaatattataggtacttgaactaagaactccagtcttttaggccagtgattgctcctcagtatcaacatttaaaagtagttagttattcttgttttctgaaaccatcctgagaaaataaaggagataccacttctgtcttgtctcttctccctggttttaaacctgtgccttgtcataatgcaaaggccatgtatttatttaaaaattataaacacattttacctgaagtgacagctgaactgtggttctaaatagcctctgttggtggcctcaaacttctgtatatattcggtatattccattaagtgcaattttatgaaaatgtcataaacaaatcaatcactcttgacttaattttcagccaccatcagcttctattgagaatctcagccatcaaaatatccataagaccatatgatgaagtacatataaagtactgtgtgagcacaatgaaaaagcaatgagattcttttggggggttcacggaaagcccccaagtgagggtgccatttgaattgagtataaaatgatgaatagagatttgtccattgaaaagggcagacaggccaggcacggtggctcacgcttgtaattccaacactttaggaagccgaggtggacgggtcacaaagtcgggatacaagaccagcctggccaacatggtgaaacctcatctctactaaaaatacaaaaagtagccaggtgtggtggcgggcacctgtattcccagctagtccggaggctgaggcaggagaattgcttgaacccgggaggcagacgttgcagtgagccgagatggcgccactgcaccccagcctgggagacatagtgagactccgtttcaaaaaaaaaaaagtaaagggcagacagaagctggagatagagtgacccctgtcagactgagggggacatttgagcaaagatatgaatattaaaaaaacaatgatccaatatggttgaattgggtgagtggcaagagtggctgttggcaacctgtgaagtggcatgcatgccaggttaagaagttggagataatttggtagcatttgagctgcaatagatcgtgtcagagagaactatgccatgaccagatgtatgacttagataaccctgacagccatggggtggacaaatggctagggttgagactgcagccaaactcttcacaatttcaggagagaaatgatgaggaatgagattgaagaagtggccatggaggtggggaaaagagagcaaattccagaaaaatattgtggatttgctcagtggaacttggcactggatgaaatatacagaataagtgcaagggaggaggcagaagattaacttggatagatgggttgataactgtagccataactaagggaaatatattaagctcctcttctcaataaagattagatttaattacgaaaatatcatctatttatttgccatcttgttttacaataatatatcttgtatcttcatataaaagcagttacggcagccctctgcactgtattttcatagggttctgtttttatcttacttaactgtaaggtccttgagggcaaaaacagtcaagcctttctcattcatcctttgcaaacccagcaccctgattcccaacagggtagaactcagcacatatttgatgaattagattgaatttaaatctatatatagttataggaataaatgcttggaggattttcctatctctgtttcaattctttgttttagctcagtctttttatgttggctcctgtaagctttttgcagtgctgcaaacacttctagctgacaagagagaaaaagaaagtcagtgaaaaggaggagggggcattgcagcatctagattgaactctccaggcttgcctgtctcataattttcacctttggtggggaactgtcccagatttcatccaccaggctaaggttctgacatggtaccttcttaaatcaagcttgaagggaaattgattgaaaagaaaacaccattatgggaaaacaattcattttcttccccatgacagaaggtagacttttgtctatactgcagaataaatatgatctggctgattgctttaagatctggaagctcagaggagtcataatggctttgctcactctttagagggaaattaccttccattttggagacatttgatacaaaggttttggttagctttcaaaaagtaatattttttctccctgtgtgattatttatattagctagatataggtgcatgaaaacttgcaaatatttctgtgtgcagttgtgtgtttctactgaagtaccctccagacagggagtaagcagattttttttaaaacttttctataagccccttaaatattacagtcgtcccatgctttctgtgttgaaagaaaacaaatttaaactcataaaggtggagtgaaggcaaaaagatagaataatgtttacctgatgtttatagtagtagaaaacacttcattgttagaaatagccaagaaggcacttacgttgtgggacactcatccgtcccgttgacaaaagttggattcattttatcttgcagaaattgcaaactagcatcccctcagacaaaatctagccctgataatacgtatttggacaacatagaaattatgttggcaagtcttttctacttcaacacagtccccaccatgcccattgtacaatggctggccaaattcacacatttaagttcctagctcccaaaagacttgaggttgaatgccttgctaaaggtttttagtgcaactctgctttgctagaagatgaattcctaccttgcaaaaaactcggatgcatgtctcctgagattggaatggacaaggaacaaatgtacttgtttgtagtacttctagaatgtctccctaaatcatcttagaagcagaaatcttacccaaaatatgatgcttgccaatatattgtttaccacccatcatgctctgaaccatcatgcctcttgtctgggtagccttgctctatgaggcaatttgtggtataaagatttttcattaagttttggccagtgaagatgttgtcaatgtacaaagtcagtaatgcttcttgtgaaatggtcgcctctcatgccaatcttggaagcgtaacattttcttgaccactttagttctaatgacttcacgtttatcctgaactagaaatatggtatcttcttggttgtttattctctttcttcttccctctttatatctctccatccttctttcttccttcttttttcttccctctatttcttccttctttccatcattctctcctctttctttctctcattctgtttcttcctcttttttttgaaaatcttagcaagagttaatggacttatgatctaaaaattaggttattagaaatttttgtcataaaacctggagaattgatgtttgaattctccttggctagagtcaatcctttatcctttttaggtaaatgaattaagtctcatgcaatttcctgtgtgggagactctttagatgaatcatttaaatggaaagccctgtctgctcatcaaggggcgcgattttagagttttcctgagtattatgtgcacgcttagtacagtcattgagatacataaggcaaccatgtgccttaatctgtatgaagtctcagttcatatgtgattatttaggtaaagtatataactgaaattttacatcttttgatctctttgcaaaatttccctgagccacttaaaaataacctttctttactcctttttgtcttgaaacatttttattggaagacttcagacctaactttagtaccagagaccgaaagtcatatctcacttagttctacaatctctagtccacttttgatactcagaatagatagtaaaggtgctatttttttaccccagagtgacagactgttataaatgttgggatcctatgaagtactgtggagagtatttaatgagccgttgtagagcctacacagatacatttatataagatattgtttttataccagcctcaaatgctcctaggagcagccagacaggtcttcctcaaaaggataatctggaatctttacctttgcaattgttctatgatacttctctttcaatgcacaactcccaattaattccttggtactccttgcaataagagaaaattaaaagggactcatttgatattagatgggatcacacttatatacctattgcattgtataataagtaagcatgagtatcattctgttgtatagtcccaaacttttccttgaaataattggcaagaggatagaggaaagacatccaagatttattaataccttcatggttctagttacctctataaactagtgaaaccttttccaaatattgtagataaagaaattgaggcacagaggtgttacttaactgattcaagttcacacagctaataaacaacagaggcacaattccaaaccagctcttcatggctctaaaatctgtgttttttccataataagctgcctaatttattgcgcttttattgtggtaattattttacaagcattattgcatttaatcctcatagccttgttatgtaagtcccaatagtccccatttttgctgatgaaggaagtaggattcagagaaatcaagtagctctcatgttgtctcacagtgaataagcaatagattcaagatgaactccagagcctgtgctcttaaccactacagaaaattatgaaattacaaggcatggtcctgccttgtggctctagcatcaagttggtaagacaacacaacaccaaggctcttaaggaatcctctggacttgagtgtatgtatgggaggagaagagggtgttctaggtaggatagtaacatgacaaattcaaggatatgagaatggaatgttcagctttattttcattttagataaagttataatatctgataagatagcatggaaggaaggaacttcactctcctggagtgtagagttgtcaggagtggacttgaaaaaaagagtgacaaccatgaggtctgataggctttagaacgcaggtcttaaagagcctggagaaaagagcgtgcatcacaaatcctacatagacagcaaaaccactgcccaggtaaaccaaggccgcagtctaatcttggaaggagagagtaatttaggacagcaaagcagaatccatctccttgggcaaagcttcaggaaagccctgtctgaatctaagagggagctctcggaaggaaaggagaaggacatttgcagaaggaagagaggcagccttggcccttatgaactctgggggaggttcctccccctactcttaactgaatgtggccataagttgaacaccagtgaacaccagcaactgctgagactgaggagagcagcaacaactgagcaattaacctttggtgatgggcttgaagttctaattaagagcagagtctcttctatcaggtgggagggggaacagcagaaagatgtatgagggggatgaaaaagaccagcatgttagcaggtcagatttaaaagacatccaaatgggtgtaagagggtgagagaaaagaaggagatcactgaccaattaatttttctgtttcccagtcaaagtttcttctcctttctcttaaccctgcagtgactgctgtgtgcagaagccagcagctccggggagagctgacgttgaatgcttatgctcctctctgttgtaaattcctttcttcatttgctgagtatcattggtaatttctatgtaaattttctcagagtagcaatttagcagcttttctgttgacaaatgaggaataacttaatagtcaagtgactgcatgtcatgtttcgcaaggaggtggaagtagcgccttgtagatcgcagggatggatgctggaagtgggcgatcttgggaaagcctcattgcctcagtgccctatttaatttcgcccatttaagataggagagaataagcttctatacttgaggaacctagtttcttgtgaagagtgattgttaggaatcttttctcttttagcacttagttaacgaatacctttcaaaccaaatcaagaggcaagaccccctccaactttgtccagaagccttcacaagcagaggcatattttgttttgtatcaaatgcttctcattgtccatattcaggaggcaggcaacagtggggtcctttttgaagtgaccagggatggatgcaggcagcaaggcatcgttgctttccagatgccacctttactataagaatcgaagtcctttaaagtggactctgagaaacttcacctaaatcatttcccaaggtgacagctctctatgcagttttttctcctaactagaaagcttcctcttgccactgcgctgaaaatgggaaaagtaggtggatggggaggtcttttttaaagcccagatttctggaatttgtggtccttctactttcctgtctccagcagtgaccttctcctcatttattcatgacagaatcatacgtataaaaattcatgtattctggtcaccgttctaaattctggatggtgaaaaaaaatatgcagggcccctccttttatggaactttcattttaggaaggaggaaacagtaagcaagtgaacagataagttagtggtataaaattgtttaagagtgactggatgggaggagggtttactggaagctcagagggttcatggtagcccactctgcagagatgagagttaaacagtgttgtgaatgattgaaaagagccaaccattcacagatctagggaggcatgctcccagaagctgagacagctagagcaaaggcctgaggtgggaaagaacttagcttgctgataaatcagatacagagccaagctgctgttgtattgtaagattatttcagactcgggagtagggatgtgtttgcacttctagctctataggccctcatgagcctgttggacacattgttaaattgatgccaagtagctcaaagcagaacccagtcccttgtccctcatcttctttctgctgacttcataagaacatggttcactttcactgccttcctttgtggacatactcagcctgcgaattaaaaacagaactgattttctcatctcccttggatcctggggaaattaaggcctgcctaggcctcagttctttccctagattgagattaaaatagctttccttgcaatcatccagatgccaatttaataaacattctctggccccttccacatataacccctggactgccttactaatttcttagcattcttctccttttctccacaaatcctccctttaaagagtgtttttttcccatgcctttcttattcttttttgtggaaagcccaaattagtttgtttatttttgcccttaaagtccaccatatccaaatgagaagtacagaagctattaccttaaaagtaagcagtgagaatcctaacatctttttttccatccccacattctcctcaatatgttccctgtcctttgatgcataagagggtgaaaacctcacatgagtattttatgcactaccattttacaagtgtttcagtaaatattacttcatgtaattctcataaaaatcttgggagatcagcaacacaagaactggtaggaaactctgtaagggggaatgtggggatgcgagggaagccagatcatttccaaagtccaaaggtcagatcttcacgttgaaacccagtctgcactgacctttgacctggcatcaccattccatagctatttgttggtgtcagcatcctggatagggggatttttttttttttcaaattgtaattcaaaggctaacagaaaagagaaggtaggcttgagaaagcactagttttcttgggactctgacttattatttggaagaaaattgattgaaagcataggtgattatttgttccttgtatctttcagaaaaaatcaagtgctctatgacattactgagtatatacccaaaggaatataaatcattctgttataaagagacatgcatgcgtatattcattgtggcactattcacaatagtaaagacatggaatcaacccaaatgcccatcaatgatagactggacaaagaaaatgtggtacatatacaccatggaatactatacagacataaaaaggaatgagatcatgtcctttgcagggacgtggaaggagctggaagccattatcctcagcaaaccaacgcaggaacagaaaaccaaataccacatgttcttacttgtaagtgggagctgaacaatgagaacacatgggcacagggaggggaataacaaacagtggggccagtcatggggaggggaggaggagagcatcaggaaaaatagctaatgcatgctgggcttaatacctaggtgatgggttgataggtgcagcaaaccaccatggcacacgttcacctgtgtaacaaacctgcacatcctgcacatgtaccgtggaacttaaaataaaatgacacattactttccccactgtttttttttaagcaaaagtgttctcacacagaacacaggcaagcatgtctaacatgttccattctaagtcttgcccttgcatgtggttgaaaatgactatggactatccacatcacaaattatgggttccagtgtgtatatggacacttctgaattcactcaaaatttttcttactgatccctattgccagatgggggagatcagcttctatattaagcaaggatgtgtccaacttttgaaatggaatgaatagttaaaattgtgcatttctcactctggtggttgcctatagctgtctccgcccccacccccacctctcttccccaccaccttcaccagcagtagaaaagtatgtcatatgtgtgtggggtgggtacagatagagaaacttggcagaaatagggtgagagatgtgactaacaccctcagctaatttctgtgcatgttcccaaacagagatctgcagagaaaggagcaagagttccttgcattctaacccaagccaccccttcacacttccagctttagttcacttctccaccttccatgcatggttgccatctgacctggctactgagaagatcagacctcccagtaggagatccaccacataagctaaaaataagagctgctacttctctgcagataccattaacccaattagataaataaaaaaaaaaaaagaaaaagaaattacagcttcattaagtaacaccagaataaactccaagaaggcaaaccaaatcagttatacaatttaaaactttactcaaaaatcaaaatgatttgaaaccaatggtcacttaaatgaaggcagaagctgcatggcagccattattggagccagcaattcagcagaagtccaaaggtccagtgcagcagtacatgtgacaggtgatgttgcctgcatacacaaaattaaatggaactagttttcgagggtcttcttgtctccatgaaaagagaatgtatccttctgaaagtccttttgtttaaaaatatgatcaggctctgaaagaattttaggtcttgatactaactaacagaagacatgcatttattaaaaattgtatcacaaaggggtgaactggggcctgattgattgatgttgaaatttgatttatccccagtagaaagtgccaggatattaagcctctattactccacaagggataccattttgcctttggtgggtgaggtaaatcttcagattagaaatggtaaagcctcaagacttccaaaaacatacaggctcctattgtatacttgctgaagttcctataattatttacaattccctgcaaagaacattcttgggggtgagtcccagaacagaggtgagcctccagctgcaaaaaccatagcaagtatggcagggagcatctttgattcagaacagaacgccactcatcgttccatcagaacaggggcaggaggttcctgccaatactgattgatgccacgaatcaactggagttgttccatgatccacatggtccttggacttggtgctgtcctggaaactggattcattgctcaaggagctgagataaaagaaagcagcctaaccaatggccagctcaaattaggagctcaaatgaacagggcctcaaggaagtcagcctctgagaatctgagatttccagactctgataatgggaatctcacctatttgtccacttttggggtagatctagacaccgtgatgtgtcagcagcctcttagttgctgagacaattgtcccagagtgcacagactaaatctaaatccctacaatatgttttcaatgaatttatgccacactaattttctaatttgcaatttttaagtcaatatactttattttcttttaaaaatagtgttttatattttcatactataacatatttccatgatattaaaattggcaagtaaagaaaataaaatatgtaaagtcattactgtcatcctcccagaagtgatgtgctaacaattagacatatttcatccccagtttttttctacagacacttttgctttaccatattgtgtacttgggtctattttcaactctgagccacttgctatattgaacagtgtttctacagacaccgtgctgtttcttctttccttctttcactcaacaatcatttactgagcattttgagaagaactgggaggacagcgatagaatgcttttgcattttatctgcagtcaactagttagaaaccagaaacaactatcttgcatctcactatcttgttatttgcacctttaaaatccctttgcagaataggtgcatagtattaatttgataactaaatgaaaacaaaatggagttcatcaaagtggatttgttttgaattggcttggagttactggcagtctatgatgacatacgctactccccaccattgacacatgcattcaaatgcagatgctatattagtctgttctcacactgctaataaagacatatccaaaactcggtaatttataaaggaaagaggtttaattaactcacagttccatgtggctggggaggcctcttaatcatggcagaaggtggaggagaagcaagacatgtcttacatagcagcaggcaagagagcttgtgtaggggaactgctgtttataaaaccatcagatatcttgagacttattcactatcatgagattggtatgggggaaatcactcccacaattaagttatctcaccctgaccccacccttgacatgtaaggattattacaattcaaggtgagatttgggtgaagacacagccaaaccatatcagaggcacacacaattttatgtgtttgtgaagaaaaggcaattgtggaaactttacttaaaaagtgtaatgtcaatctcatgagttgaggacagttaggagaccctgaaatgacacctgtgggcttgcattttattcttggtcactgctaaaccatttttcacttccctctgtttcagtaacctaaaaatctagggttcacaaaacaatgagattaaggaagccaactgataactattgtaataggataggaaatgtttcctgatttgggaaggatgggcaaggaggtggagaatgagcttccaaggcagttttgattttccggaaaaactcatcttaaaactgattatctccccaacatgagacctaccaactgacctgtatcagcctaactgcaatgtatctgtctaaagctgttaaacacagctattttcaaaacatttatccattttcataaaagatttcttaaaattcaagctaggttttcttcctttatttgaaaagggaatatggtaattttaggaatatgattatatatgcatatgtggaagagaagcagaatacttaaaagacaagcatttcctctttttatttgagagagagaaagagagagaaagaaactcctaggcaatcagagcagaacattcctaaccttacatttgatccacccattgagctactgaataaatgcttaatatgtcagtgagcccacaagtttcttgtcctgggccctttaaactgatatatctcaatcacctttactgaaatgttatcctgagaagaccgtaaacccagggctgctcaccactgagtcttcttttatgaaggtttctcaggagaacatacagctaaagatctctaacatttttcctgagtagacctcttttttctcttcatgaggatatcataataaatgactcgttggtaatttatcagagcttgttccttccccaacccattctccttaatgcattttttaaatttatccagtatttgaaatgcagaagtccaggcttggtaggaacccagaagagaagaaggtgaaagaacaaaatgactgtgaagctaagaaatccagatttggaaggagtagcatcctcacagatgctcacagaagtccatatgacactccttgcattgcctggggctttatggaagaagcagggtcacgcaggattagtcattgcccaaagagcgaagagcatggaactcgccaatagcctgcaaactctttccttttggcttttctagcacttactactcttttatgacttttactttacttaattttcttatataccaggaatataaccaaccagggtagttgggggccattgtgtattgagcactgcccaactcaattcacttagcttgcaatgtgaatggcttctctcttctagaggtgctcaaggtgcaacccacataatcacacctgatagccatgttgtcaatgcccaatcacattttaaacacttggagggcagagactatgacatagagaaagatttgaatagctattcacagaattcagttgagctgaaaaagtcagaagaggagactagtttcactgactacaagaaagagtgatttggttttctgagagtgaaatcttcccccacaaacatgtactgtttggcaacatgtttttttaagcctttagaattgtaatgctttttgctgggtcatatgttctcaaattttgcctcaagccccatcattccctgttttattatggtaagcttattcacacatttatatacctgccaggctattgtaggtattttgatatgtggcttggcctttctgggcctcatttaacctctctagactgcagttttctcaactgaaaaaattcccatcatatctgccctgcctatatcatgagactttgtgacgattcaaaggagcaattcaggcacaagctgtgtaaaggttacagaacacaatatagactacattatcattaaactacttgatagtcttatgactatttttatggtaatgaaacgtaatccaatgcaacttcgtatatgtaagtaaaacttcttaattcttgtcttgtaaaactgaatcttcatcctttgactgatcaactgaccagcttaaaccttggagaatcttaaacttctgaacacattttacttctctctttatgttcccctgtggatctcttatgagtatacagagattgagagtccaccatacaggttacctttcactcaagaggttgtggcatcctattcattgtcaactactggactttttcctccccgtcgtggaaaattggtgtcacattgccacatggagcatcccttcttcactcttgacccttccttcatcaatggtggagcatcctcctgaagctggagaagagaaatataaagctatgtgtttcagaatgaaaggaccaatcacaagaaactctcaagccttaaaatacatttagcttttggatataatacatcacatctgtatttgttagtaacatattaaacaaaatgatagataaaatgtagattatataagaacctatgtaattgacatgatttagatactcattcaaagatgagtcatgaaaaaggtacggtattgtcattgcacagtatttcctatccctgtgacatatgaataccaccttcaccgtttttgtagtattcactcatcacttgcactgttatttacttaatagtcttctttaagttgatttattttacttaaatatatttattttgaaagcaaaatatataattctaaagtaaatgaaaagtcggtattacttctcataaataaaaataattgtaaaaataaaagctttaagaacaaattatgttgttatattttagctatgtattatagcctgacaaaagacaagaattagtcctcatttaaaaaaaataaaggagattggcagattttaaaaaggcttttaaagatatataagtgcttattttctctctgaggaaataaagagcaaaagaaaacttaaaagttaataattttgcataagtataatttggaatgattcagtgtattttttcattatgacttcaaatcatttaatgtatcaaaaacatagtcataaacattggggtcatcatctattttgattgtagagattttacttttatacatagatgttttcaacaatataacctaaatttctgggaagttatatcttttacatttattttaaaaatctctctcttccctcacttcttcattgaagtaataagggacttaacttctttaaaccaaagtttccattatagataataaaacaaccatcacaacaagaaactactaaatgattatttattcagatcccagaagaagtgctttacacggatactctacttcaaccctcacaactgctccataaagtaaatgctattagagtaaccgttttacagatgtgaaaaataagtcttagagcaatttcttagtttgctgtgatcacacagctagcatgtcaggcaatctgatctggcacctgcaatcttaacctttcctgaaataatcttattacttaaaaaagtattactaataatgataagaggctatatttcattattttttgaaaagtatgtttatggtctatgtcacaaattaagagtgacaatcagaaactcctgtaccattggaaaatgaaattttacaatttggattgctgttcaggaagcaaggttaaacaaataaacaaaaataaacaatgacaaaagccttttaatgaccattctggatttttttttcattttaaaaatgaatgctcaatgtttcttcctcctagtgtattgctttacttccttaacagaatcctattttattaagaagactgtgaagacaaattttagactgaggttctgagagatgtcttagagccagagaaaaatgaaaaattccagaagtctacagaatccaagtaaagaagactttgtttggaattggcagcaatgacttccactagtagcttaccatgctagtgtaattaatctcactcccatttctacttctttttatggcagaatttcttaacctcagcactgctgacatagtgggtcatatacttcttcattgtgaatggctgtcctctgcatggtagaatgtatagcagcattcttgggctctatccactaaatgcccagagcatcccccaagttgtgacaataaaaggtatttccagactttgtaacattactctggttaaccacagctagagattacctcaacttgtgatacttttctgcttattttggtgttaattggtatctgccattgttgctggtggtcatgttattgttgttgctttgtcctttagtaaaggttccttctctgcttagagacaggacatgcttagaaccctttgggtcttaataaaacctcttttaatattcaaggtatagcagtgagatataaaaatgattgcatattgacatatatctaaatattttcactttgatttcagcattgaatcaacatctctatcagcttgtcttcctggagaaggatattttttggaggttctggtcaagctcagtggttactgaagctgtcgggagtcttaccaccttggggtcactgtggaaaccagaaaataaatggacaaagctgggattgctttttggctagtataatatttccagaatccctgaggcttgcttttaaatcagcataagctggttttgtgtctcacttttgtgttgtacaattacagaaagcagcaaatacttatcttggcatgtcctgtcatgacatgagccaaaagctgtcatcctcatagattccctgtctaagggaatagttgccctatcagcatttgaaagaaacactcctgaaaccttttggagactctaaagttatgtactgtcatttgatggataagtgactcaaaattcatattgatcacatcatttcaaattcttacctgttagactggtgagagaactctaggtactttgttgggaaggatgatggagaagagagaagtgaaaatatgaaggattacttataacaaaagacttgagaaatattttaggcttgagaagcattttataagggaaagatatttgtgatggggactagtaagtaccacttttcacctattgccatttgaaaattgactgtttgcatattgtttttttctgaaatgccgctatgcagtcagggatgagaaggggattgtgattgagtaaagatctttcttagaatcatgtcctcatttgtaaattgtgattttctgtccattaagaagataataatttctttttcctgacatggccttgtatttttaacttcttgctccacccatactcaaatgcaggttgatttattctcctttatgctaggtgacttccccctgtgtatactctctttcagaagtatttctttctatctccctaaaatcaaaaccaatgttcaccttaggttgtgtagaaaagtctctgctaaggcacctcacacctttctaaatcacataagttataacttatttatatatttactttgaagtaccattcctgaatatctaatagtgagattaatgagttggttaatgtggtatcaatttagggcagaaatcattttgaggaactcataaatacctactattatgatgtatgaagcttcaggtttttatggctgccactcaaacaaagaaatattatttggaagatgtgatttgatgttagtatttaatcaaatgtacttatttcacctacttgctgaataagcacccttctttactaccatcactggttttcatattgaggtatgtggatttatcctttatcattgctcacctttgaagatggtggcataattaaagaattacaaggggatttcagaaagttgtagataaattgaactaaaagataaaaatagaaaaaatttatttctcaacataagctccatcgggttcaagacatttttgtaagctatgataccagtgatttagtccatccttaaagaactgaaggtcctgaaaatataaccatactaatgcattctttttgacattattacctgaagaaaactgggtgccctttaaagaggttttaagattaggaaacaaagttaggaggagcaaaatcagggctgcaagatggttgcctaattatttcccatcaaaactctcacaaaattgctcgtgtttgatgagaagaatgagcaggagcactgttgtagtggatgaggactctctggtaaagctctcctgagtggttttgtgtttttgtttgtggtttgcaaaagctttggctttctcaaaatactctcataataagcaggtgttattgttctttggccctccataaagtcaatgagcaaaatgtcttgaacatcccccaaaactgttgccatgacctttgttcttgactaatctgcttttgctttgatttgaccacttctacctcttggtagccattgctttgattgtgctttgtttttagaatcatagtgatgaagccatgtttcatctcctgttacaatttttcaaagacatgcttcaggatgttgatctcacttgtttaaaattttcatttaaagctctggtcttgtcttcagcttatctgagcacagtggtcttgacactgattgagtgaaaagtttgctcaactttaatttttcagtaagcattgttagtgaaccaattgaggtgtctatggcgttggctattgttcatgctgctaattgatagtcctctccaattagggtacaaaaagattatttttttcttcagaaattgagtggatggtctgctgctgtaggtttcattctcaacatcattttatcccttcctaaaaatatccatttttaaactgctgatttattttggccatcgtccccacaaactttttgtaaagcatcagtgattttaccattctctcacccaagcttcaccataaatttcatgtctgtccttgtttcaattttagcagaatttgtattgctctgataggagcacttttaaaacaaatgccttttctcttactccctcaaactagatcatgttcagacatgttataacaagttagtacaagtttattttgctacaaagccaaatagaaatttatgcatttttttcttatatgcgttttccacgaacttttggaagacccctcatatatccatctacatatatggccagtgctaaatctcaatggaaattgaagacacagcattactcattggaatgaaatggcttgcaggaaattcccaaagctggctagaaagagttgaggtaacctcttccctcttcatggttccagtatcacccaaagcttttcctcctcagcactaaatctttgctgcaatactccttcttcagaggtgcttatgaaatggcctcatttcaaagaatgaaagttaggttgtagcaggaattttgaagcccagaactttaacataaatagttgaaaagaagaaaaataaaaactctttatacaaattcttaatcttagtttactctgtgtgttaaattgtcattgccataatgattttagtcctttctctgacctggattctcccactccccagcttttaaatttagtccattctatgtagtgcctcttgtaatttagcacattgtaggtgccccattagttttgttgctttattcacctgcatcctcacacatcgtgtgattgtgcttgcagagcacactgaactacaacacattctctcactctgaaatctgtcaccataaagcataaagcaaaatccttccctcctttactgaatggatggctgggtggatagctgttctttgcacatgttcgtgttgagtaggtgctgtataaaatcacttgttctttttttaacgtgactcacgaaaaaattatcccagctttcagtaatctcaaggaaaaaaaaacacttgccatctgcaatttactgcttttaacctgaaaaataggatctaaaatgatactcagatacttaagaggcttcacgtgttgtaggcagaagctgacagatggcacatggtggtaggctgttgcctcataaggagggaaggcagaagcaagtagacagtggtatggaaagcttcttgggaagaggtcatgacaacgcttcaaccagagataattaattatttgctatattctgtaactagcctgtttatacaaatagctggtgtgctcagtacaacatagcagtgaatctatggaaaaggaatctgtaaataataatgcaagggaacttctcttacgtctattgctaaggggattatcatagcattcaattttaagccatgtaacctggaatgcttactaaatgtgtaattcttgttcttcctcttcatataatgcacagacttgaattcctatattgagagaataacttacctcttttaaataataccataatttgccttgaaggtagggaagaaagagagtgaagtggggaaaatttcaaaattctgtcttccagggagcatattcctactcatctgtgacgtctaatgtaatagattttgaagaattatttgtaagatagatacttggagaagtttatactcacttcctaatcccagactatagaaacttctgcattctagaatttcagagaatgtgtctctgtcaattgtattctgaagataagatacatttgacatttgattgcttcaatcaacattctccaatgcagatcactaggcagaaacatcttgacacggcatatatttgatacacaatgattatttgcattgacttttaacaaagtcccatttagaaagattgaaagaaaaggcaaatgtgattggatgtatgctaaagcgtgttcagtatgtgttttgaaatatctttgaaagttcccaggatgtggcacgtatcattcacttgaagctgaaaatctctcagttgagcaaaaacaagtatttgctttgttccatgatgcactccacgtgtgactaaaatggcaaagtgaagcctctagtttgtagatacttgctttgggagacagggagctgtccgtcgtcctgaacgggtcatgctttaatgaggatagacacagggtgcaaaggaaagtgactgggatcccctgcctgcactgactttaacaataaagatactggaataatgagatcccatggaatttagcaaaatacgagtagaaacaagtggtaaagacagcccagactgtagttcaaagtctaagaacatctaagctgcgggttcaggtataaaattagggccctgtggcttatctcaagacagtaactttcaaaggggggtttgaatagtctttccaactgtagctacattacctgaggcaattagtttacttattttttgtttttgttttttttttttgtggttagcttttctttttttttaatttattattattatactttaagttttagggtacatgtgcacaatgtgcaggttagttacatatgtatacatgtgccatgctggtgcgctgcacccactaactcgtcatctagcattaggtatatctcccaatgctatcccgcccccctcccctcaccccacaacagtccccagagtgtgatgttccccttcctgtgtccatgtgttctcattgttcaattaccacctgtgagtgagaatatgcggtgtttggttttttgttcttgcgatagtttactgagaatgatgatttccagtttcatccatgtccctacaaaggacgtgaactcatcattttttatggctgcatagtattccatggtgtatatgtgcatccatcaaaaagtgggcgaaggacatgaacagacacttctcaaaagaagacatttatgcagccaaaaaacacatgaaaaaatgctcaccatcactggccatcagagaaatgcaagtcaaaaccacaatgagataccatctcacaccagttagaatggcaatcattaaaaagtcaggaaacaacaggtgctggagaagatgtggagaaatagtttacttattttttaaggcaagcaaggtgggcctgattgttacatgaattaccaaatctaatgacaaagccaggtgccctggtactgaggctgtgtctcctctactccccatttcctcccctttccatcactattttctccaccctgcctatcctcatttctctttgctcctcctctttttccttctactctcttctatcctcccattcttttatttctcctctcttacatcccttccactccctttccttctcttcctttttttcttctctctgtctctctgcatgtgtctgaattaactcttgagtcagcatttaaatttggtaattgaatgttatgggtctttatgggcttcactttgggagaactgcttttcaaacagagaacctgataagtggtggaccttagggttactttgacatgtttacaaaaataaacttatcagtagttttagagactgccattggagcaattatagtctatgctcacagaggcttggtaggcttaccacaatccaacctcactctcccatcattgattctctgctctgtgaaacaagtactgtactcttcttcaagcccaggtgaataaggcttttctaggaaattctttgggattataataaaataattccttctatgagaaaggagaaaatggtggcttttggtcttaagtagattatttaccatctctctcaagagagataaaccataattcttaacaaaaccatattctaatgaagtcattggtcacagtgtcttctatcccaagagagatgcaaattactaaattcctgtcctggtacaaatataagaaatccagtcatggcctgacaagtttgaattccttcttgtccttgatatactctgtttacccccattgtaatttatctcttccttattcctccatattatttaatttagtaagcaaatgtcccctggtataagctgtgtgaatattataactgaattactgtctgtttgcttaactcattacagaaaactatgataaggtttttaattacaaaattagccctgccaaatgaatttctttcattcaatgaactgcaaaaggtggtacagtgaggataaaaatcatgtcctttcccatgttatttatagtacttttttctaaaaataattgttataataaaaaataatgccaacaacaacaacaataatattttcttcctcgtctgtttttgtgtgattcctttaaactgttaattcatgctgaacttgttcaaccaagattccataaagtaatcctcttcaacctacattttattctcagccttgtcttgaacatcttactctgacctcactagctcttcacttaccaatttgtttctcatcttctccttaataaccttatgaataagttttctatgtagtcccttgtattgctctttagacctgtcacttatcacttcttcttcttaggatactcttctccactgtaattcttatgtctactctaactatatatctttgaattctttagcatacataaacatatctgataaagcaggatcaagcacaaagatgctgtatcttgcctgcatccaacagactgggattattctgagctctcaagcaaaacatggttaaatcctgacaacaaaatgaagtgacatttatgcttacatatatccttccttgttttctgcattttcatttgaaaagtaaacatctagtccattttgtttatgtgtctaataatcattttattttactttaatttctttggtaaaagctatggactatggccattgcagaattatcataatttccatggagaaacttctgacatattttaccaaatatttttgaaatgctacactcacagttaaacctagagaggattaatttgggaaaagggactactttatgaaaatgtgggaaattatttctattctttcccttttgtcatgcctatttccctaaaattagattatttatactatacaagtaattaaacttatttcaaaatctaaagttaagagaaattaacaggtcattgctcagaaaaatgcatagtaattgtgagttttctaagactgtcacaacatttgaccaacagtctccttactgaaattttatggtttctttctctagacaaggccacatgcatatgaaagcagacttaaaatatttttacctatagctggaaaatcaaatcataaatggcaaactatgtattacttatgttataattttggagctataattttggagctataaatccaggatatcagacttttttcccactaatattgtagtattaataaaaaattctcttaatgtgtttgcaactaaattggcattaatttaatgaattctttctttgaacattcctcatttttagccagcggttggtggttgagttgcaaatggttattgcctagtaagagatggcctatgaagaataatctatttcactggatcccttggttaggaatgtagcatatgcttgcccaggtccacttctaaggaccaggtctgtttctccttgctactgcctgaaatagcataataattaattcaaaagttggctgcttttcactagaagtctttaggacattgtaagacaattaagtctgtagaagaatgagaaggaatcttttatttgaggtctagaggtgtcataactgtgaatcacaaagttgtggcacaatgcattcacctcagaaaattttcttcatgaaattaaagtttcattttgtcttaaagaaaaggttccactctcatgcgattttgtgtgttctcatcaaagcaagaatctaacttcctgatctggttactgggaatctatgcagacacacacaatccaacctctggggcctgttttgcaaacagtctttatgtcatgatttagaatactgcataagaaatttctccttgaagagagatgactgcttttgacagttggcttttcccagtgcagtcattagactgcacatgactgatgtgtgtgcatggacagggaggggtcttcattccctggaactataatgtcaggtttcatattgtctgagatcagcatctcttcagaaacaaccatgtactcctttctccccaaaccaccttccctcctgaccataactggttatataatcttgcatcttctattaccctgactgctgatccgtgcctgatggctatgccaggtctcacaacaccacgagcttttgattgctgcactctaagctgcttaataagacaattaaaaatgatttacaaatggccatcacaatgcaactggggatcaggaagagaatgttctatttgctccaatattaaaaacgcatgcccttctacagttccttctgcagctgcctttgatttcagtactggtttactccctttttagaaattatttttttgatgaatatcatgttaaaatagttcctcctaaataatgtatagctggaaataattcaagggatgtgttacacatgctaggtggtctgaaatcttcttccctttggtggggtaaacactgcctagaattctggagtagttaaaaagtagtacaaatgatctttcatcatgccggctccttctcagtttgagggtcaaacctaatttaatcactgacacatccatcttgagcatttcctctttcctcctattgttgcattgattaaaatgggcaaatctcccaaagattccattgtgagtcacacaaacgttcatctataaaaagtggaaatttatcagaaatgatgaccttgatattttgaatgtaataactgagaaattcaagtagaatctcatctagtatgtgttgaaaatgctcattttttgtttaattttgtttagtttttttttcttgtccagaggaatgaaaattgatattggcccaaatattaagaagattctctatttttagtgctgagacccaaggattagtaagatgggcattggcagggttaccataacttttcttaggaaggatgtgtggaatagattttttaaaaagaaccatctttgaagccagatatccctgtattttattcttgcctttgttacttagtaaagtgtaggactttgagcaagatgctacatctatctgagattccattttctcatctgcaaagtgaatacactaatcttaacattcagatttgctatgagaattgcatatggttatctttgtaaataaagtgcctggcacacagtaggtgctcagaaaacattgatttcttttaatcctctcattcaagagcacagatgataaaatatttatcactgttagtggtgttatccctggtatatcctggcaaatgcagtgagatactaagaagtttgatgctgaaattactttttcagcactagattattacatttttatgacaatttgaaaattaacctatcctatgtgtatcaatagcccagttttgtgctattttcaagtaatatgaatgttacagtgatggtggccacatgatatgttatgaaggaattttatttacatcaaacttcccacaatagcctgtttattgaattatccctgaaataaaaccaataaacctgtctttggaaaccagtgaccactgacccacttacatgttatggatggtttcttttctgattgccagttagtgtgattggggtaaggaggaggtaactagtgtgactttcttcagggctccccttatactctatgtgtcttctctccctagctgtctaaagttctcttcaccttgaagagcctcccatatttaacagtttatgatggatgaccagcccacattagggcactgttcaaatttcagatactcaggaaggccaatcctcagagtgtttctgatcaaaacattctttcttatctgttctgcttttttaaaattgcttttacttttcttcctttttttgttattcctaccaggttttgttgttattttttttcttcaatgatgtctaattgcaggttaccatttcatctgctactttattttttatgcctcaacatttggtcttctcacctctggttcacttctcatgggattttcttcacctaaagttacaacttattcttccttgtcagtcccacctctctggagctgccaaaagctccctcttgcccctacctgcttcagccagcattatctgcagatatatcaggtaccatctgggtcctacccttctcatatagatccaccccaaatctacctgccttttcttttctttctttctttccttgttttttttttttttttaccttcaggacttatgattctcagagaaaagagatggagaaaccagcccataacttatctatctgagctgaaacagaatcaatgacaatagtggcataagtatccaatgattttgagctaggccttgtgagtctctgactgtaaggtcaccctccttatctcaccagtgtgctgagccttacccaatcctcagcatatcacacccatgtactgagtcactctgcatcaatcccacgttggggaagagagcaaatctattggcaggggataatacaggatggaattagcacaaaggctcttctagtactacaaaatggctttcttgccatctacttgacccagcaaaactgttgtgtgataatatttaccttaaagttggttgttagagggagatagttgatattcacatattagatctcaatagaaaaaatagatagtataggggaatattttttactccataccaaacttaataatttaccattttctatgaaagtgtcttacattctacttctgtattttaataacatgttaaaattatgataattatatgatgtttttaaattttttaggtgcttttctttttctaccatgacaatgctaagtttctcttcctgattattcttgataatattctcccccacaaggccaatgttatctcctgtttcttccctccactctacctaggctggtttcctccctgttgactgtcctatcatgcgtgttcatctttgtattcttcttgaagcctgtgatgactttcactacattctctaccttcgcaaatgcagcatttccttcaaaagtcagttccaagtctttcctggacacaaaaatcaccacttatgtttctgtatgtgaaatttatcatgaaatgtaatacctaaatttatagtatgtggtatcgtttcctgtgctactaagtgcattactttgcctccttcattagagtacaaattcctccaagttaagggaacatggagactatgggcacttctctgattcatgtgatgttctcacaatattgaacatagcacatgaaagaatatgtgattatcagttggttagtggctggcttgctttggatagtcattcattcattccttaataatggttttctagactgtgggttacagatgctcccttccatcctcagtcacccttgaaaatatgttgaattacatcttacactttgccttagattagcgtttgttactatgaaagaaagaaagattttctgcctttcacagcctggatcctactcactgagactataggctgtcagaatgctacatgctcccagccctttaactcttttcactctgctatggccacaactggaatacaccttttcctcaattacaaaagccacacaagattctacctgcagcctcagtacacttcaacaattctcttattagtccttttgtaaacttactacctaagattttgcagtccctttgatgtctatatatcttgccaatctatcacttgaaggtgcctgttttactccaatgacaaaaaaaatccaatctaatattttttcaccttttctttctctgcctcagagttgataatacttacctttgtcactttcgtctcacctaggtccaggcatgagcatagccctgcttcatttcaacttagcctatctttatggccttcaggtctcctctcatctggaattgagttctgtagattttgtcctgtatgcccataatccactaaatagtgttcccattgttttcaaatataattcacaggggtaaagatagaaaatgtattttttagggctttttctaacaattatattttccatggaatgctgaagtcccacaaggaattctgaggcccaggtaaggaagaagaattagggaagacacaccagtgggaggttgcctagggcacaccaaaccattgcaaaagtatagtaaatccaggccaatccacaggtgagattgagactacagaatacattgttctttggttagaattggcttaacaacaagtcaatgacctaagctagggtaggcataagctggcgtgtcttatctcttatgcaaaattgtaagttctccgagaatagtcttccacacttagcatattacttctattacacattttaaaagataattttgattgtatgggttaagttaaatgtactccatgctcaacgttaattgatgaacacatatctattaagcactattgtggaaaatctatttggtgaggatacacaggaactccaaggaagggtaagacctttattctgcattctaggagtctgtaacatagctgaggagaagaaacacccagtaaaaatgtgtcactgaaacttaaacaaattatttaacttccttaaaaagtagtttttaatatgaaaaatgggagattaaagttggtcttctaggttccttagaattctagaactccaagtaaactagatatacatgtgtccatacttatgtcagatgggtgctatccacagtaggtgctacagttatgcagaaaataaagagatatctggaaactggggtagatatacattcatggaggtgttggagtttgaactgagccttaaaggaatagtcttggaaggaaaaattattatccatcactgaataacgtgggcaaaagtacagggaaaatacatctctacttttttttgttgttgttggggcaggcttcagccaaaagagcatttggaattgtctcgacttttccctgctctagacttctcctgtctctgcacatttgtttctgcattttcagaatctagctattttagtgtaccaaatctcttaaaaggacctgtattcattgtgatacaacccctataggaacttgagataatcagaatttcaagagaaaattatagtttcttggtgcctgaactgacccaacctcatgggtttaggatactaatcagtggttccctggatcagttatctgatcctgtcaccaatcaaggacaggactgtcacgtctcaaaatactactttttcaaggggaagaatatttctcctttagtatgtctcagcggaggtggaaaatgcaaataacctttttaggagccctttaaacacatagactcctcacttagggcccaattagtaggaacaaccaacctactctacaaggttttactcttcccttgaaattacacttcaaaaaaacatgcactgactccccccaggcatagaagcaggatccgtgttttaattctaaccttaattaaatctttacacaaactcactatttggctgtccaatgaagaagggcaagtagaaggaaggaagtgaagagcatttgctcttcctctgtcttccgtgagggttatatacccaaaactctctgtcttaatttggaatagggggaattagattttgtcataaagtcataagagttgtgttataagagtacgtgtatacagtagttgaaatgagtgcccagaaatcttcctagtttcttccccacctgtcatggagtttcattgtattaccttgcacttaacaaagccaaatcattgaaagatacagtccctccatgaacaacaatcaattctgtaactgatccttacccatctatttcaataccatgcataatgacactatcctttggaatgcagggaaaaaaattccaaatgacaatttgtcttaaatgtagacagtgctttaaaatatatgcctgatcataagagtggatatagtatttaagtgtgtcagaactttcttgctcttctaccttcctcctttttggttattgttgaaaatatatggggaaaaaatggcaaaagaaataggccctacatctgaattttaagttcctgttttttgagagaaagaaatattttgtttattttatttgttttttttttctttcccattagtaaaataattccaactaaggtaaagtttagtggaactaaacttttactgtgtgcaactctgactttcaagagtaaaaggaaagtaaatgtaataccccagtacacctaaaaccaggattaatgttttactttatcttgcaacagtactaaaattaaaagcaaaacaagacacattttagatatgatacagtgagcactagagaaaacctcttttattgatgggagcatattttaaaatatcttctcacctttagtctttgggttagtctcagtccctctgcatagggagcaaacaatacatgaagaactatttgggggaaattgctataaagaaacaataacttgctagggaaaaaaaaaacaattaactgtgaagcatgtatccctgaatctgaatcatggccataatacttattagtcccccaaatttgagcttccattgccttacttgtagaatggagaaaaaaaattcctcttgaggtgtcagtaaaagaagatgaatgtatccctcatgtttattctgatcagattatttttattttttgccttatggcatttacctttaacaattttgaatatctctgaaagaaagggagaaaggatggaaggtacgaaggagggtgaaaaggaaggaaggaaggaaaggtctttgttttccttacctggcacagctaaatattggcaaatcacaatagatagcaaaaatctaaaatacctaggagtacatttaacaagaatttatatttttaaactataaaaatgaataaatactatctaaatcaaagactatggttttgagtggtgacaatttaatatcaaagtaattccccactacatttctaagtaaaatctccctctggtgtctttttcttaatttcccagtgttcttaaaattcctatggaagaataaatatctgaggatagccaaggaaaatataagtaagaagactttgagtaagaactatgctttataattctaatataaaaccattgtaataaaaaataatgtatgaacctggcatgaaaagtgggcaaatagattaaaggacaagaattgtagctcagaaattttccccagcatacatggaaatttaatcacttccaaagctgttatcacaatttagtggagagatggaaagtgtttttttggcaaatggtagaaagataaccaaccatccatatagaagaaaataatgttggtgcctatctcacatcataaacagaaataaattccaagtgaattgaagacttaaagtttaaaaaattattaaaaatattggaagaaaatttggactagagatacaatctagtgattggttgaaacattgctaaccaaaacaagaatcctatatgctataatcttaagagaaaaaaggtcaacatataaaaagtttaagagaaatttaggccaggcacggtggctcaatcctgtaatctcagcactttgtaaggccaatgtgggaggatcacttgagcccaggagttggagaccagcctgggcgacatgatgagaccctatctttacacaggcacacacgcacatagctgggcatggtagtgtgtgcctgtagtctcagctattcagaagactgaggtaggagggctgcttgagccaggaggtaaaggctacagtgggccgtgttcatgcccctgcactccagcctaggtgacagagcaagaccttgtctcaaaaaaaaaaaaaaaaaaaaaaattacaataaaagatatcattgccaaattcaatatgtaaattatatatttggaaatgtaataaaatgtgtccatgagaattacaagtagttataaccaaaaacccaagtaactgtggcttggacaaattaggtgtcttaatttttgacatgtaataagaagttggaaggtaggcaatccagacctcatacaatgactccatgtggtaatcacaaactgagctcattctacctgtctccttagctgtcctgactatataggctttcatcctcatatttgtcacttcatgttcactgaatggcttctccaccttaaggcaggaaataaaagaaaacaggaaggtgaaagcaaaaaatgtatatgtgggctaagtttgtatcttttaaaagaagagacccagaagtctcttctagtaaattatggttatatatctttatccataaatgtgtctatcccagttgcaaggacaactggttaatatgatttgttttgtaattgtttttgtttctctaatctgggcatatttgcaactttagcattagagttattttactatggggagaagggcaatattaattccagaaaggtggctagcagtgcctgccacacaaatgaaggtagcgttaatgtctagactctacctaaaatttttgcaaattgataactgaggaaaacaacccaatagaaaaattggtgataaatatgaataaacaattcacagaagaaaaaattcagattatccttaaaccaatgaaaagatgcccaacctccttcatcgtcagacaatttcaaatttaagtaacaatgagatgttttgtattcatatgattggcatgaatttaaaagtgtggtaactcctattgccgtttgagatgtagaaaaattttaaattgttacagcttttttttaaaaaagattaacttttgaatggcagtttctattgaaagttttatatatatatatatatacacacacatatatatgctttgatcagaaatcctaattatgagactctcatagaaataaaaataccagtatctagctatacatacccaatattgcatcatattttgcggtggtttaaaaaaaaaaaaagaggaaagattaagtaaatgttcactaatagaaaaatggaattaagtaaattatagtaaatccctatcagggactattatgcagtcattttgcagaatggacttgatctgtcttcatctaaagcagatgacttagaaatatttccacaatgtattgttaagtgaggaaatgagatagtaatggagaaagataagaatgatgcaggttattaatctgggtggccagcgcttggagagaggaaggggagcaataggggaatatggaatggggaaagcaaaagaaatcaaattttagatatgtacacaagtaaaataacttagaattcagatttcctttttttttttttttttctgaggcggagtctctctctgttgcccaggctggagtgcagtggtgccatctcggctcactgcaagctccgtctcccgggttcacgccattctcctgcctcagcctcccgagtagctgggactacaggcgcccaccaccatatgcggctaattttttgtatttgtactagagacagggtttcactgtgttagccaggatgctctcgatctcctgacctcgtgatccgcctgcctcggcctcccaaagtgctgggattacaggcatgagccaccgtgcccagcccagatttcttttttaaaagacctgaaataaggaagagaaatcatagcataaactaagtttaacaagatcagtgtgggataaagaacagaagattgagaatttttttggagctgttcctgattagatgttagaagattttggttatcaccaatccttttcagagaaaaattttataaacttacaagtatccattgcacgtgctttacatttgttttatatcaatatgactgtaaactttatagagatctttttaatacatgaataggacatcttatttttaaggcaggtaaatgtgctttttctcacttcaaacaaattatgtccacaagctgaataatgagaagggtacttcatagtgtatcacactgccgaattacacgttcactgttttcatccttgaaaaccgtgggctgcttcagagtgggaaacagtcttcactgcttataactgagttccagaattttcccagccatctgattcccaagcccagagcttcggcttctgggttctgttgctggcagtgaggaagtgggatagcacattgtttaaatcacagcacttctctgtttcctggctaagttacaaaacagtgttgtagtcgtgaaactgaatatcatcagcacacatttgtggcatgcacagagcatgcacgactctgtagtagcgctctaggcaagcttatgatggcttttaaaagaggtgttgttgcttcctttaggaagtttatgaactaaaggaagacaaaaaccaaaccaaaccaaacagaaagcaatgcattggactttccatcacagcaattacatgtctgattctgggctttgtgcctattaatactcagtaatatccattgaatatgtgaacgaaccaaccacgttaacaggaactgtactgttatagcaattcttaactggaagttttgtcttctgcctcactccactagaatctatctccatccagttgaatgcaaatctgataatatttttttcctatggtttccagatagctttaggaatcagaaagaggcactgattgtaaacctgaaagtgtgctttgtggagcctgcatgatgttttaaataattgaattagaatgccttttaatgagcggcacactctctagttttcccacagaaaacctctagcctatggtgttgaataggtgatcccccagctacaggataaaatcccaactcctcagtgatgtacagactcttcccactttatcccttgcttattatttcagtcttgagtcccaccattttgctatatgcaaccggcactctagccatgctggattgtttgctgtttcctgaatatgctgtgctcgttcagtcctctgcaaatgtacttatgctacttctttctcctgaattgcttattctgtctcattaacctagtgtactccctcctacccattcatgttcaattaaaatattactgccctcataatatcatttttaactgacctagaaaaacaagttagatattcacatcttcaatattccatctatttatcaattgttgcactttttatattgatacttatctgactcttcacccatcagaaagatggagttctctctttgtacaccttgcacctatcactggcttcatcacaggatccctatcacagtctttttgatgaagcattgttggatggatagatggatgcatggactaggtgataaatgaatgatgaaccattaagtgaaataaggagtgtggtatagacttggaaaagaaaagttactgttgaaatagctctagagaaaaatattttttaagagttgtataggataagatgaaggtgaggatgacttatctataattttatctttggaaattgtgagttaacatttgtaaacagggtggatattttggagagaaggtgctacataactacagcacaattatttattatcctctaaaatagtccctttctttggcatgtttaaaacctaaagtctggttggcgttataaatatgcatgagctgttgggggaagagagcataaagtgtgaatcacacttcaaacagacccacccgctcactcccgacttcaagtttttcagaagtgtgaaatgaaaatgctttaaaattagaaaatgtgccatcagaacttttatcagccctcggagaaaataaataatctctaaatgtggggaatgctggggatatttatttagttagtttcacagctaagatgctttgataaatttttgtgtcataaaatgcacaaattaattttaatgaatgtggaaacaaataacttctaaaacagcctgagtacccaaggctgcaatctagggtttctgagggattattgaaacctaatctatggacaaattgtctcaatggggaaaagaaactcttacaggtgtctttccctctgatacatttgcatttgaagggtgatcttgtagcatttgaggagtgggtgaatttctggaaagagacacttggatcttaaattgctaaatggtaacgaaaatgagagaaaatagtacagttagctgtttgctttcgagtttgtggaaagtgattttctaatcaatgttactcttgatttcttaagcataacaagattaaaatgagtgtgaatataaaagatcatgataaaagataaaggatgatgacctgagatcttctttattttttattactaatttgtttgaagaatagtccatcatttccagtaactttttgaccaaaaaaatggctatgtggttgttgccatcaaggccagtaatagagaagagggacaaagagagaggtgctccattggtatcctcaacctgtgtgtagtacataggcatcactgggtgggctggagctagcccagatggctgggctccacccaggtttcctgatgcagtatgcctggggttgggcagcctgagttgcatttgtcataccctcccaggtgatactgatgcacactttgagaaacactgctctgttccaatacttacatgcaatttttttaaaaaaattatgtaatgaccatctgtggttaaatgctgagctcattttataaaccttaagcgtcttggcaagtgtctctgtcttttttttaattgtctgataatttaaaataccattttattagcctactattgtggaagttgaaactctattatattcactctgttattgttaaccacctcacattttctgtggtatcgtagaacagaaattgttctaaaggaatggaaaaacaacatttactttcatcaaattgttgtctagcctcttgattgagttatagctattgttactaatttattgctagtttttacaacatgcccatgatttttttctgtttcagactgaaagtaaatctgaatagatgaaatctaatttaagtacatgctgttaggttctgtgttttgggggatagattaaaaatacaagagaaagcacaagacaacatgatctctcacatgtatacatatgttcaactgcatgtcttttgttgataatctccaaaacatacatattttgacttcagtaccataccagatactggaaaccaagtgataagatgactttactctgggatgtgaatgtcattgagtcagcagctttctaccaaatcattaatctctgcccaggtccaaattgcttcagtgattttcctaccactcagcattttccttggtgaaggacccttccaatacaagtcttctggcttttctttctactagagggaaggctttctctcagcagctatttctaaaatgaggctgatgatgagagtgatagatgaaaaaactcatctctgaggtttgtcttcttcttgcatctgctgatagcactcacttctcagctcctctttatacctaaaagatgtgcttctctattatttcaataattctgatgctgctcattctttacttattttcagagatgtttatgagatttcaagctccttaactagacatatacaaagagcaagaaaacaacaacaacaaaaaattctccctggtcttttctggaactaacaatagaatacttgaccaagaaccaagattgcagactatctcagtgttagtggaaccatttcacttctcgatgttttcttataaaacacacagtttgagctgtattgttaatctacttggaaagatattatcattttttaaaacaaatatctgctgggtgagtgttaggcaatggctctcaaagtgtagtcccaggaccagcagcattagcaaattcccagttcccacctcaaacctgctgagtctgaaactctaggggaggaacccagcaatttgcgtttcaacaagccctcccagatgattctgatgttatagcaattcttaacttgcttaagaatttggaaagtcttacaaataagggcaggactgggtggagaaaatggagaggtctgattatctttcatgtaatccccacataatttggtgtctgcaggagacacttttatttgtttgctataaataactgggagcttgccagtggtgaagaagatatccagagaacattgtgaatatatacttagtttctccaacctggacagaccaggagcctttatgtcaagatcctgcacggataattcccctcaggtggagagctggtggtttttccaagcacccagccacaactgccactgcattctatttctttaatgctcaatcagtgcccctggccatttgatgatcattcctccctaatgttgtgaggtatttagtccaaatagtacaatccatgtttgctttctttctcttctagtaaaatgtataggttgctgtaatagcctgtgtctgccccagaccacaatcataaaaataataataaattacctcgctgtctctgggttttctttcaggctcaacatgtggtttgtggcttatggggtattgattgtgcattatcagtttagctcacacactgacaattacatgtagcgccaaggtagccgtgacaatgtagtccagttgccatagcaatgaaagaaggcctattgctgctacctgcaacctgctttatagtgataaacgtgctgcttatttcattttaattgaaatttgaaatcatagtctctagcaagaaataaatggactcattccccatttttcccccttggccacacaaaaacaagtattagtaggaaatatctgagcatttttaaaaagtaaatatcaaatttttgacagtatgttttccagtagtttcactggtactagaaacagatgaagagtgatactttgctgaataaaaattgaattagctctcatgtttttgcattcttaattaactgctattttttatttccctaagtccctcatcttaacagcttaccctgcatggtgtactttatataacagagactttaatggatttacttgctgagtttagttcatatctaaaaactcacagcagatatcataaggtacttgaaaattagaatcacagggcgctgtggaagcttttacataattgaaaaaattgataataataataaatatttagccatgtacggtttcacttctatgccagtgcctcatctatgcctcagacctaataatctttatgtgacgtcattactacgtactacagtcatatacaatctatagtgctatatgtagccaagagagagagatactgtgaaatatggtcaggaatgaagagattctatgtcagtcagtccaaaaaagatagaaatttagtacagaaaaccaaccaactatggaaatgaatagtaagatagtaactaaatatgtatagatgtgtgtatatgtatgtgtctgtgtgcatatatatatatatatatatatatatgcacacacacataggcatgaagtgccaaactatttttaaaagtatgaacttggtctataaagattctaaataggtcagtggaagactgggtcaaatctgagattccactttgaccttttgatctttatctgaaagaagtcagatgatttcccttttctggtacaagcctgtaagttagcacaacattttatttccctggactatgtgaagtatatagtagatatttaggacagagagaaacctatggtggggagtaaaatttaactagggtaatataaaatataggatctccccttaaagagcttatgatgacatgtggctgggcacggtggctcacgcctgtaatcccagcactttgggaggccaaggcaggcggatcgcttgaagacaggagttcaagacaagcctggccaacatgatgaaaacccgtctctactaaaaacacaaaaattagccgggcggatgagggttcctataatcccagctacttgggaggctgaaacacgagaatcgcttgaacccaggaggcggaggatgcaatcagccaagatcgcgtcactgcattccagtcctgggcaacagagtgtgaccctgtctcaaaaaaaaaaaaaaaaaaaatcttatgataacatgaaaacttatttttttataaagtgacctcagaaaatgtgcacagggtggggcatctcatgtgaaaagcatctcaatcattgattccagccacatgccatcataagcgctttaaggagagatcctatattttatattaccctcattaaatcttactccccaccataggtttctctctgtcctaaatatctgcttttagaaggagtaaacatgacttgggaattagatggctcccatctgtgaaaatggattcttaccagtggtgttttttgggtggttgggttataataaaaaggaaaatattatttcccttatattttagtctttcttcttactcctagttataatcatggtcctccaaataattatgatgataataaaatgatcaatatcatgtttaatttattttatgtccttattaatacttactgagtacctagcatgtgtgaagacgatattctaagtcagcagtccccaaccttttggcaccagggaccagtttcaccgaagataatttttccatggactggggttgggggatggtttggggatgattcaagtacattacatttattgtgtaatttatttctattattactatactgtaattatataatgaaataattatacaactcaccataatgttgaatgagtcggagccctgagcttgttttcctgcaactagatagtcccatatggtggtgatgacagacagtgacagatcatcaggtattaggttctcatgaggaacgtgcaacctagatccctagtatgcacagttcacaatagggttcacgcttctgtgagaatctaatgctgccactgatctgacaggaggcagagctcaggcagtaatgcgaggagtggggagcggctgtaaatacagatgaagctttgcttgctcacctgctgctcacctcctgctgtgtggccccagtttctaacgggccacagaccagtactggcctttggccacgggtttggagaccccttttctaagtgttaagacaagacttggaccttcatggaacctatattctagtaggattaagacaggcattaaacaagtaattacacaataaattacttaagttcaattataatgaaaaatactagattctacaagaaattataaaatctactataaaattctttagtgttgttagcagataatttactcaccatttaaaaattatatcattgattaaatcaattttaaaatgggaagtgactttgagaaacagacttactacaaacagacacataaagaaaaatctggtacatgttaaagagaaatattgctataaaatcagaatacattatatgaagtctacatttgaattatgccatgtgtcaagtttgttaagcatataggtaagatgtaattattattttgctcttgatctacttttattttttatacccttaattctaaacctttggattgtattgaactttaaaatacatatatttgattcatttaattttaaataattgaaattattatcaaaacctcattgctctgcttgaagcagtagctctacttccctatacttcagtttttcatgtgttatagcaagatctgtactagaattagccagttcaacccaaccacatctttctgtttcgtccttgccttgactgttaattagctcagtggatttttatgtcatgaatgcatttgttttctaatacatcttcattttaatgtaagatggttgaaaagaaggaccaagtcctctgagaaccccatagtacaaagtaaaatgcctcacatctgacaaatgctcagtaaacatgagtagtgggaaatcttgattatatgctcattaaaaatatatctatgtatttaaagtagtaagtctggtgttcaaaaggtaaaaccttcaaaattctaacacagttcttgtttggattaactctagtctataatcacaactcttctgtttccttgtctgcactgtgctcacataatggctatgtctcttaccgccaaagcccggctcactgcttacaacggcatcctgtttcttcacctgtttttcttttgcttacctgacaagctcttgcattcataaaagtcgaaaggattccagcttaacgtttcaatcccacaaagttgacttccatagcgtagcctggaacaccttgtctgtgaatagatatggaatcctcaaatggttttgaagccactaccagcaacaggtctgagatcataggacccaagaagaaaattgaggctggggaaccacagagagtctttccacaattcaaagtaataacaaagcagccacaacagcagaggtggggagagatgtaggcatcagattgcctagagctctaacaacctaccctccacatagaagctgctctctgcttcaggcttcagatccttaaatatgggtggggtccttcatttagtgtcaaagaattgattagaaagctcctgcaatgtaagctcattaatgaaaccattttggcaggccagatgatataattagcccaaacaagatatgaaatctacagtgttttgggcaactgttcagtaatttttaattttgtaataaaaaagacaaggaaaggaaacagcaagagaagatgattcatgcttattggtgaaaaagaataagatataaagaaaaagattccaagataacatttgctagatgtggatagtaccttcaggtttccatcatccttctgaagacagtagcatttacaaaaactgtatcatctctacctttacaaaagtaggtgctatgtcaatagtgtgtttataggatgcatggatattcttcaaaccaaagtataatcacaaattctggtctcgtcacagacattcatttaaggaacatctccctcccctgcccccatgctaacctgagctttctggaggatgataaaggcgacctgaataatgaagtacccaagtctcactactgaggcgagtcaggggtaaagagtttagcactgagtggctgaggatacgtatcaagggaaaatgtcatccttgggacttctctttaaataccagaatatgttttgttttgttttgatttgttttcctatcagggatgtgtctttattggcaatccctaatggaaattgctctctaattttcctctagtcttcttatttgtattgtttgtatatgaaaagatgagatgaatagttaagggtactgcacaaatactttgcttggtcctataggctctcaggtttttttgatatcatgtggcatttgtgtcaaattgagttgtgctgtaattttattaacaagcttcacatctcagaatattttacagagatgcacctaacacagttgacatgttgtctattaaaagttacatcatcttaagaagttattagtccttttaaacatcattttcattctaataagctattttttatttctaataagctatttcttatttctaataaactattttttatttctaataagctcgtgtcttgagcagaaacactaatacccaggaaattttctgaggactggctcacttaaaatgaagggaagtcactccacgctctgagttgtcttctctcatcttcttcatgtgaaatcctggacacttgcagattcatgacaattcagagattattaatccaattgcttttaataaagactgtcctgaaagatacacatggtgaaacattctaattgtaaaagattcatagagcaaacaattctgtaacatctatttccatatgatttgagcaatttcacacttgggaatttttttttttttttttagatggagtcttgcactgttgcccaggctggagtgcagtggcacaatcttggctcactgcaagctccagctcctgggttcacgccattctcctgcctcagcctcccgagtagctgggactacaggcgcccgccaccacgcccggctaattttttgtatttttagtagagacagggtttcaccatgttagccaggatggtctcgatctcctgacctcgtgatccgcccaccttggcctcccaaaatgctgggattacaggcgtgagccaccaccgtacccggcccatacttgggaatttttactacagctgactgaaattttttatttgaatcctattttatatatgaggatactatttcttctttacagcattaaattttctagattaaaaaatactcatttccccccaagattttataaaataatttctggcacttctctaggttttctagctgtatgctattttgagatgacttggagtcaaactgtctgggttgaatcaaggctgtccccaccagttactgtctgtctgaccttgagaagttatttaacctctcagtgtggagatgttcatggtacatatctcatagggtttctgagtggataaaatgttctgatacatgcaaaatagttagaatagtatttgcctggcataccttaagcactcagtaaattatagccattctattttattccattccatgttaatggttcaacatgaaatagaattgcatccaaacaaatcgtgacgtcaagggtgttacctgaaaaaaaaaggtgtttcttacttaaatatattaagtaaatatagggttgtgtacaaattttaaaattttgctttactgtgggacttttagaccttttcatatataaatatgtattgtgtatatccaacgtggctaacatgccatgtctctctcttttttatgaatcacccactaacatctccagtgaatcaaatttggaaacaatgggcagtcacaataagatacatgtctgaaaacccaaagttgattttttcatgctttcagtaattacattgaagttgtcccaaaggcagaagaaagaaaaagaaatcaagtctccaaaatttctctatcctttagaaagaaactccaccttaatttttggtgaggagtaacagatctcacttgggtggtagttacattttgtgatgtgagggtgtcagctttttctccaaggatgacctcccaagaagggcagggtcactcacttctgctacacttcccagctgtctcttttggctttgcacattcctgtctcatgactctacagggaaatccatgatgtagattttcctgtattcaagcaggcaaagatacgggtcaaacatttaaggccgttaacaagaagttaaatcagcaacaacatttatatagaggcattaattcagggtgaacgcaaaatgtgttgcagcatcgattctggcatttttctctgctcctaatagctctgagcatttgatctatatgttatatggacctaaatgaagggaaataaacatctggacagattccttccaatcgagtttccttcttaccatttttctgctgtgatagttaaccaaggccatgggcttcgttcacctagaaccagcctaaaattaaggatgctggccagagtacccaagtgtgatgcttgtagcatttaagcatacagataaattctttttgaaaaatttcaaacaagtgtaccatgagcggagtcagagcccctcttgaaagcaggttggtaaatttccagaaccacttagcagttttcataggtggcaaggcattgtattgttatttttattattgttaggagctaacatttgtttccaggaactgggctaaatggttcaaattcattatctcatttaatctttacaatatttctgtgaggtagaaagtattgttatctccattttagagatagcagttatagaagaggcatctggagctaaaacagattaaatgaccttttccctcaggttcagagtaagtgtcatattgcaccccagaataattctgtgctcaccataatgatttacccttctaaaaggtaatataatgcaatttcagaaattaatgattcttaaaaatgtgtaagcatgcagtgagccgagattgcgccactgcactccagcctgggcgacagagcgagactccgtctcaaaaaaaaaaaaaaaaaaaaaaaaaaatgtgtaagcataagaaaaaatagcgaatgtccttttctagcatcacactagattttacgggtgattacaggaagacccttttgagattttcagcaatggacttttcttggatgagacggaagatgctctcagctggtgtgactaaattgtttgcgacttgaggacatgggtcatgccctctgtgtgtaccactcactatatcctcatcacagttcctgcataaagcagagattcagaagggtcagtcgagaacatggatgacaacccaacactgtaacccagcagcttgtgtcttggtgtaacattggtaggttttgtttgcctttacatttttaccataagaggtcaactagagtttctatcttgttacaagttcattacacaggtatcccttattccttcattcaacattgcaaagaaaacatctgtaacatgctttgagtcattaagagacattgcatacagtcaaaaaatagcatgaatttattaaattcagtactttggctgataaattgagaggaaacctttattgcaatttggtggtgatagtggagagtctctttccaaatataagacctagcattaagaagtatttccaagtctcctattttaggaatctcaaatctctaaattcgagatatgtggaaaaaataggcaattttcaagaaaatttgtgttgctgctagccctttggcttgtacaatacatatttttttttttagaatatactggaaagatgaaatctctaataggtatctttctggagaacagtctttatagcaaggttttctttacacagagcaaccatgcacatgtagttaatggatctccagacaaaggccatttcttccctaaaacaaagccaacaaggcaattgagccaagtaacttcaaactccccagaggggacagcagccattcttaaatccaccatacttttgaatagctatcattggtcattatcttccaaatggctttgtaagtgtctaggcataatgtgattgctttggaaattctccatttttcagggtgctgggaaggacatgaacagacacttctcaaaagaagacatttatgcagccaaaaaacacatgaaaaagtgctcaccatcactggccatcagagaaatgcaaatcaaaaccacaatgagataccatctcacaccagttagaatggcaatcattaaaaagtcaggaaacaacaggtgatggagaggatgtggagaaataggaacacttttacactgtcggtgggactgtaaactagttcaacccttgtggaagtcagtgtggcgattcttcagggatctagaactagaaataccatttgacccagccatcccattactgggtatatacccaaaggactataaatcacgctgctataaagacacacgcacacatatgtttattgcggcactattcacaatagcaaagacttggaaccaacccaaatgtccaacaatgatagactggattaagaaaatgtggcacatatacaccatggaatactatgcagccataaaaaatgatgagttcacgtcctttgtagggacatggatgaaactggaaatcatcattctcagtaaactatcacaagaacaaaaaaccaaacaccatgtattctcactcataggtggtaattgaacaatgagaacacatgaacacaggaaggggaacatcacactctggggactgttgtggggtggggggaggggggagggatagctttaggagatatacctaatgctaaatggcgagttaatgggtgcagcacaccagcatggcacatggttacatgtgtaactaacctgcacattgtgcacatgtaccctagaacttgaagtataatttaaaaaaaaaaaagtccctttcttctttatctcttcctccctgcccctttcactgttctgcccaacacaaagttcaagtcgtctagagacgaatatggcttttgcttttgtagggactttttcctgagtcccttcctagcagggtacatgcaatataggcctgtgagaataactttctgcggtgacacagaacagtgaaaactgtaagtcagtctatggtgagtgcaatcctacattatttcatgcataaaaaagtcatacatctgtatacatatataacctatttcacagtaacaataaaaacatatttatcgattcatcagaggatagacagatttgtgtgtctatccaaatgtattacactgtgatttttttcttccttgagaaagatttccctgaagacaatatttatggcagggcaggaatttatattacacttgaatatatgttctgacaaagaagcacattgcattttggaattgggtgatattggacattcttcaaaaaatcttctaaagggaaagaatgtttcatctactcatttgttcagatttccctataatttttagccagcagtcctttatggatcagatattgcatcaaaaaagaaggggaaaatattcttgtcatggagacattttcagattaagttgaaaaggtccataatccttacggaaattttttttttaatcatcatcaggctattcttgacagtcagtaaaatatcaggtctttctcatttaactgacagatttcttctttttgctttctttcttccctctctgtatctatatctactctctttccagggctcacggcatatagtaagtattgaaaaaatgaatttaagtctaacttatacatacttgtgaaacctcattccttatgataaagaccttaagcttttctaaatgcagaatcagccactggtcatttttaatggacacgtagtggttgctattttctggagtgcaggattcattagggtcattgctggcatttggctatgttcagttgccccggtgtgctactgaaggcaagtgtccaaacgccaataatgtttggtttctctcgatattccgaggttatatatcaaaagaagccgtgtgtatggcttccagttacccatccagagaattcctgaaaaaagcaaattattcttaagatcccctggaattatgaatctcttggtggagatgcatggtagggaaaagggaaacttgatctggtttattctgaaccctttcttctcatcttatccttctactaagtcacttgaaaactgttaagaaggagaacatataggcattatgaaagaaactatgttgtagcagaattcttcaaggtctcaggatttacccttataaaaactgtacataatctaaagcataatagccaaaacaattcagtatgaatcagacgtacacatacataattgtctcattgagtttcccatctccactaagtcatggtcactgttttgccttggttatggtaactaaaagccaatggagattaacggaaagccccccaggagaaaatactcttttgcggtctttggatgaaggcctgagtatcagcaggactggagttctaaagaaactgctatgcccattgcatgagacacatgaagtaatgaactatagacaagtcatcataccagtatttcagaaagtgaaactgatataagaacacaggccagacaccaactcaaacaaactatggaagcagggagagcaaactgaaatacaaaggcatggccagtagccagagcaggagtgcctcagaaattgatgatagatgaagacaatttatgtagcagttcgtctaatggcagttctgcagggaggcatccttttgaaggtgatggctcaggttggcctacatgttcctgcccaattttaaaggtgtcataagccagtgtaattggggatctgtctggcttctgacttcttgcataactatgttcccacttacattggggtcttggcataatttgtctcctgacaaagagaaaatagaaaatatccaaatattccagccttatagcatagatgggtaaatataagacctttccttttagcattgatgacagtaaacacaattaatagctttctatttgccaggcatgtgacatacgactctgaaatcttgcaacaacccagttagaacgacttactaagacttgaagttaagtttgcctaaatgtatacagcaggtgattaaaatatggatttaactgctgatttgttcatatttaagatccttgacctttccactgttataatagtacatattgatattccactggcgatgagtaagcatgccttaccacttcacaaatagataaggtggcttctaagaaaatctcaaatagaggtggtcaggaagccacaggaccaaccaagaacccagaaacgacagtgcttactagatgctgcttgcattctaccatgtggatacaatgagtaaaacttgggtactaaagtcaaagtgcctgccaccacacctggctaatatttgtatttttagcagagatggggtttcaccatattggccaggctggcctggaactcctgaccttgtgatctgcccacctcggcctcccaaagtgctgggattacagatcccaactggattgggatcttagcacttacttgctgtataacttctccaggttactgatcatctctaagtctttgattcttgttctgtaaaatatgataatagtaggaataataatagtgccttctttagagatagttgtcaagattaaagtgcttagctcagtgcttgacatagggtaaatattcaacctatagtcaatcatcttaagtactcttgtctcaccgaggaaccatcaggaggtgtaggtaatatgcaaccttgaattagatgtaataaaatggaccccacaggaagtatttggggatattttaggcatattttccagtacacatatgcaatattagataatattttccaaaccaatgctatttaacctcaaatccagcacagtgaaaaaacattgaaaggtaaaagaaaaagtcacttcacttccatagttctcagaattaccatgtagatatcaaaaggtctcttccaactctgaaagtctgtgactaattttgttaaacccctactgtgtgcaaagtttgtcactgggacgaataaggttgacactctcagagaagcaatatgtaaaaagacatgtacaattctcttaatttttttttttttttttttttttgagacagagtctcgctctgtcacccaagctggagtgcagtggcatgatctcagctcactgcaaactccacctcccgggttcaagagattctcctgccccagcctcctgagtagctgggagtacaggcacctgccaccacacctggctagtatttgtatttttagtagagacagggtttcaccatattggccaggctggtctcaaactcctgaccttgtaatctgcctgcctcggcctcccaaagtgctgggattacaggcgtgagccaccacgcctggctatgtacaattcttaaaataagctaaagtgataaacttaccctatggctttgtcatagaagggttttaaagacaaaaaaaaaaattgaaaaaaattgaacttctgagaagaatggtgatattatagatatgctatagcctctaaataagaatagtgatgtttaaaggaatataaattaaagagaacactaaagggaaaagagagatggattttaccctctggatctgactttggttttaaattgcataggcaagagattggttagagagatttatttcaacctttagtagtgtattagcagtgtcacagaacaagggatatggttaaaagaaagaaggtgagaaatgcgaacaaacaagatagtgtcttggaatctgatttatttaaatttagattatattgctgttgcattaatctttgtataaatcatagttctaagcacattaaacttacgttgcagtcaatttttaattttgcaaaccttaaccgatgtttattattataagctgtgaacatttttttaatcattgagaaggcccctctcaagtgaaattttggttccaaatggccaaagtaactaatgggcagggaaaaaaatctgcttaaactctcatttcaatcacagttatgtggaaacatcttgaagacaacagtaaaggaaagagaaagaaatcaggtggatggagaagatacactagaggaatgagatctcctacatgagtaaagtgttttctaatgtgtttttcttgaatgatagcatcttgaatttcctacaaagtatggaatagtttacctctgactagcgctgccctacagaacaatgtcaatttattctaagactgcaatgttcagaatgcagatatgatcagttcaacccagatgagacaatcctataaatgtaataatagaaataactatttgaaacttgaaaatcagaagtgttttaactttcttcaaacacttagactataacaacatttttagtctaatgtaattagcgcaattttcagaggatatgtttatatcaagaatattcctgtgggagaaatagaaacttttaaggagaggtttctaggattcttagacaactaaaactttcgtttgactcagaccctgatattacattttcccaggattcctctcacttgtgctgttttcagtgattgctcaggttatttcgaatgatggcatacatatatcttctctgacatgcaaaaatgccagaaccttctttttcctccctctgttcccagaaagaactaagaacggtctagctttgagctaaattgtacagctgactgtttgttttgggaacttccaaatgaacatatttggtgttgcactggtgcatcccaggaacagaactgtctgaccagaagagcaattctgcttctggaaatttctagcacataagaagatagctggagggtatgtttgtctgtatagtttagaggctggctggtgctataaaggaaagtaagaaaaaggcaaagatatccttcagaggattcccccagaagaaagtagcagttatgaagttttattcctgaggtaggacaggcagtcagacccaagaggtctcagtgtctctccctgtgttggatgtaattgcttttcattgtcaatactgaaagaaggcacacaagagacaaatgaaatgtgtgtgtataaacctggctttggttttcagagacagtcttcttacaccttcagatctcctagatgagctgggccttacagaaaatacaagtcttgagctctatttgtttacagttttcaaattctcagcttctgcctgtaagatatctcatgtgattaactgatttttctaatttaagggagttattttctgtggaggaagaggctataaagtcacatttttatcttattttcttttttttttctctgatatttcttctctgttttccacattccttgtcactgtcaaaactggtaattaatcaagagttagtcatggatggctccttttccctccccttcttatccttcattttcctgcctgagtgataacgaatgatgtctcttgtcctgtacccctggcttcctctcctcagagcattcaagccagaccccatgacaagatgctcccagtgaagggagaaaactgggaatgacaaatgtgagtctgggaacccaggcatcaaggggtggacttcctgatctctaccacttgccatcatctatctctccatgtcaggaggcctttgggaaaagcagaaacaaaagagaaaggaaaagttctcatcccagcattttagcatcatgagaaacctggaagtacctttgcaatagcactaaaatatgatgagtcttgagtctttcccaaggttttgatacccaccagcccacgagtatacatgtaggcatacttttactctctactttctccagcttaatgtttttccaagtgtctggaggaaaataagagcaaacatctttgtaaaattggacacatctcttctttcattatatgattggtttatgtgtctgaacaccttaggactcagtctttactcttatttaactgaagagattaggggaaatacttcctcacccaccacagagtctgaaattctgctattagagactcatgcctttaggtgaaaatgttgcatctccaagaagacccatgaaaacagaagtgattctaggtagaatgaagatacaatataagctaatcgatgatatcctcctataaattcctttggcagatctatttactatggagatccctagtggagaggatggccttaaggaattgggaaataaaatagttaacttgagataggttgaaagagaaaataattcctgagaaaggaacacaatactgcttgaaaatagtactaatgtatttttacagattagtttttgctggttcctgaaccaaatgactagctgggacttcttattctcagatttgcctcacacccacttaagaaaaataccagattgacatcctcaagttataatctaaaatcccagggagggagcacactagtcaggggtgagattaaatgaggcaaaagtgactgcatcacatttcactgtctatagaggctattggcagatttatgcaggctgagttaagtgaatgacttgatagcctggatcacatctatatgtgtttttcacaggcatcatgtcttagttagttttatgttgccataacagaatgccccagactgggtaactcaaaatgaacagaaatttatttggctcacagttctggaggctgggaagtcttagtgcatgaaactgacatctgacatgggcctttgtgctacatgatcccatggtgaaagttatcacatggcaagagagcatgggagagagccaaactcaattttataaccaactcacttctgtaataatgacactgatccattcatgagaacagagccctcatgacctaatcaccttttaaaggtcccattgttcaacactgttgcattgggaattaactttccaacacatgcactctgggggacacattcgaaccataccaaacatccactctgtagaatgttgcccttaatatgctgtgattgatatagatagatagatatagatatagatttttttttccttttcagtgtgttttagtatattagttgggtctcatttgcttgcttaaactgttgtatgaaaaaaaagaaatgtgctgcaaagatacagaggtatattgtgcagctcaaattaggtcaggaatgttattaatttaattagttatccatgcaatatgctgcataacaaacaaccacaatatctccagcagcacaggacaataaacacttatttcttatggagctgtgggttgcttgagggtcagctattgcagcttgagactggctaaatggctccactaatctcagctgggctcactcaagggtctgggggtcagttgaggttcaggttatataggctttgctcaggtgggctaggtcagctctattacacatctcttatcctatttctgggtccagcctgctagcttgggcaaattcttttctgtttctacaggttaattttggctggttactggaccaaatgtctctgtggaaattctccttctcaggtttgccttatatccacttaagaaaaatgccagattgacatcctcaagtcccagtctaaaaacttgggtaggtgcatggtagtcaggggatgaggtcaaattaggcaaatgtgacttcatagccctgctgtaaccagctggaaaataagagaatgaacagacaaaaatagacttgtaccacattaatgacatactgattatttgaattagttaattttgctaggagtagagataataagagtgtggttctcagttgctgcttaccccgaacaagagtcttagtaaattgaccagctgagtcatttgaacttgattcttggtaggaagacttttgcgtggcttatctactgttttttcttctctttttcttttcttactgtatctgtaatttctttttttttttaattccatgatttactggaaatctcaaaggatgtttgaatgaactctaattatccgttgtctttgttgtcgctgactccactgtcaaaaacccaagccaggcatccgcttggtttggtgaccttaaccacaatttgaaggctgctgactgatcagggcagtggttgcggaaggttggggtggcaaacaacaaagatgtttcccgcaaggaatttgagtcttcctttcatgaaagacttctttgtagcatgcgatgctatttgatagcattttacccactgtaggacagctttcaaaattgtagtcaatcctctcaaaccctgccattgctttttcaactaagtttatgtaatattctaaatcatttgttgtgatttcaacaatgttcacaacatcttcaccaggagtagattccatctgaagaaactactctttgctcatctataagaagcagctcctcatctgtttaagttttattatgagattgcagtaattcagtcccagtcccatcttcaggttccacttctgattccactctgccacacatttctctgtgagtctgttaaaatatggataatccaaataacttctttctaatgtgatttatatgaaatggaagcatgttctccttcccccttatgtgctcttgttttgaattgcaaatattcagttttgcatatatttaaaagttattttgacagtatgtaatgtagatttaaaacattctgaagttggctgttttcccttgatcaattcttcttttagaagaaacactgtaaataaaccaacaagtgtcagagcatacagtatagggaacagccaaggacaatctgttatgatattctgtgtattaaaaaccagtttgtttataccactaggagaatttcattttttagtatttggatttgatggatttagtgagaacgatatgatttgcttcattagacagctatgccacagctgaacgatgtgcattactcttaatgctaaagggagataaatgtaatgatagaaaaagttaagggaaccaaagaggcaatattcctagaataagcagatgaaaatttaactatgatgcacagaagttaaatgtcagtaattccattcaactaggtcagtggaattggggcaggaactttcttcattgtagcagtgaagctgttagctggtttacttagaaaccttgaatctgaggaatcatctccagagaacacctgatataagctacagttttcttgactcatattccaaaatggggattgaactgtgagaaagactacaagtaatttctgagttactgaacttagaaaaagcaaaactggccaggtgcggtggctcacgcctgtaatccagcactttgggaggccgagaaaggcggatcacgaagtcaggagatggagaccatcctggctaacatggtgaaaccctctctctactaaaaatacaaaaaaattatctgggcttggtgacatgcgcctgtagtcccagctactctagagactgaggcaggagaatcgcttgaaccctggaggcagaggttgcggtgagccaagatggcgccactgcgctccagcctgggcgacagtgagactgcgtctaaaaaaaaaaaaaagcaaaaccttgggacttctttctttcccttcttattttcacctttccttctcttccttcttctctttctacttcccttcttgtctctctatttttaccttattcatttcctctcgtgcctttccattttttatatcaggaattaaataccctctagagtgaaacgatgaataaaatctactagtcctgtgagaaggacaaaattaaatgtgttgggttgtgtttgtgattgtgctgatgacagcaaaagaagccacactgaggattgaagatgagaaaaaacaaactacaatgttcactaacgtaatttttaagggagaagatataaagattaccagagttcacactttcaaattgtttgcaatcaattgaaagtcgaaaaaagttatatgttgaacaacatatgagaaaaaagcaagtgaccatttaaggtgatatgtgttaagagcaaatcaactgatagagatagaaatgtggatgaggaagaccaccactattccctggggtagtcaaaggaaagttggcctggtactggattttggataacactgaataagattcaaacagacaaaccatggttggggcccagcttgagcaaaggatcagaagcagcagtattccagacatgtgagaatataaatttggttcaagtagaaaggtttcaaatggcagatgactgtggaaaaataatttggtgaaaacttataaaaggcccggaatgctgagatagaaccttgggttctattcagtatatattttgagaaccactgatggtcactatggagaagaaagacgtgtgctatataatagaacaagaattgagaggtcattgactgggggagtttcctagacccagagaagggtaagaagggatacattttgaaggctggtacataaagagaattaagatatcaatgagacatattttaaaagccaagagaaggagaggaaagtggtcattttcagttctgaaggtgagagttttgaggtttggatgactatgaaataacccagtgagaatacccatttatcagtgggaaatcctgaactagagtttgagagagtctgctaagctaaagttgtggatttgcacgttagcctcctgaagaggatggttgaattcataaatatggatgatactctacagaaaagaagtttgcttagaggatttggcatatccatgatgagagtataccggggaagcaaggaaacactgaagagagaaggggtggtcagaagaactgtagaagtggggcaatatgtggaatagtgagggtctcagaacagacagaggacctgggccttgaaggccagctgcgtcatctggagatgaagatggaaggaaatggggatcattgaggatgaagaagaaaaggagccctaaaggtctcttacagtcatcactttgtccgtagaaacacatctctgggaaggaatgagttaggtttttcttattctttcttcattaataaaaatagaaaaacaggtggtgaaacaaattggaaaacaatgtacacacaactaatactcttgaagaaagagatttcacactgtgtcctgctaacctgttctgatattcaatggcacttgttacccaggagttcttttttaaatcactatctgaaatccctattgctctcctgtgagctgtattttttttttttttttttttttttttttggctttcctctgtttatcctcaggggacagaaagaacatatggcaactatctctcaagtaataatccttcaattttggaaatacgtattatataagatttttcctctctagccttttattctttgagctaaataatactaagaaatttaggctttctttatggtcatttcttcccaggacaatggcacagactgagtcaaattcagttcctaggacttggataaaatttatattgaagccactgctttgaatcagcgagcagtactgatgtcaagtttgcctattaggtagaaattcaagaatgaaatgatgatgacccttttgggaacaactctgtgcatcctttgtatcctgagagcacttatcaaaactaatagatgagtaataaatctttcaaaacaaagaaaaccgatggacaaagtggtgaaaatatagcatttgtctcttattgccaatgcgtggcacataccaactcaattcatatttgcatgaatttatgaaagcaaggatgaaaaaatatgtactaagatataaaattagcaatattatttttaaaaggttgttaaaagtcaaggccttttgggccaggctgttgggctgtttcttaaggatatgatattttatttattttaacatattcagaaacacctagtggtattaaaacctctgagattggcagcatttggccttttagagaatgttgactctactttctttctctagaatttattctatcattttttatgacagtcttaataaagatgattgaaagactctgggtattaattcatcaaccagtatttgttgcaggccaactaagagtttggcactgtgttccaaggggaagttaagtaagcacaaaaatcacaaactattaaagttgataaagctgctgatttaagccaaaatagtaattctcttgacaacataagagtgaatgtttacatagcattgaccttttgccaggcactgttcaagcactttctacgtcactacatatttcttttaatttttacaacaactcattaaacaggtactattactatccttattgtacaggcgaggaagcacgtgagaattggctaaagccatatagttagtaagccatagagttaggatttaaacttgggtccaaatcctgtatgcttaaccattactgcaccagagaggtcctccaggcttcccttgagtaatctgaggaatgaggtgtgtgttatcttttttttttttttcctcaatcaattgaggttttattgagctagagcttgagggtgtgcccaagataaacaagagtcacagaaatcctctgtggcttatgttctccctgaagaggttttcaggaggctcagttttatacatttccttgggggaaaaatgtgtgtaggaagagttggggggtaggcagaagaatgattgctctcatattgtctttgttccatacctgagaaaataaggattattagtgtgaagtataataggcatatccttgttttgtgggagaatatacaccttttttaaggtattaagattatttttttctgtaagttattgggggtacaggtggcattcggttacatgagtaagttctttagttgtggtttgtgagattttggtgcacccattccccaagcagtatacactgtaccatatttgtagtcttttatccctcaccctcctacgactcttcccccaaagtccccaaagcccactgtgtcactgtaatacctttgcgtcctcatagcttagttcccacatatcagtgagaacatacgatgtttggttttccaacctgagttacgtcatttagaataatagtctccaaactcatccaggtcacttcaaatgctgtgaattcattcctttttatggctgagtagtattccatcatatatatataccacagtttctttatccactcattgattaatgggcatttgggttggttccacaatttttgcaattgtgagttgtactgctataaacatgtgtgtgcaagaatctttttcatataatgacttcttttgctccgggtagatacccagtagtggcattgctgggtcaaaatgttgttctacttttaattctttaaggaatctccacactagtatacattccctccagcagtgtagaacttccccctgttcaccgcatccatgccaacatctactgttttttgattttttgattatggccattctggtgtccattatcttttaccagaaaactcctcctgttgaaatggaatctttcttcccatacctttcctttattggtctaatttcactgcctggaggaagatggagattattttctacagagcagactctggatctgaagacagccttcaaactcctccagaaattgtttcttcaggattaatattctctccttaaattgctacatatgacatttttcatttgtttagctttgcaaaacttgcctattcaaaaaaggatattagatagttcacagagatatacacaacagacaagcaagataatatatatacctccaggttttgtggcatcaatagatttgataaacatactttgtgtcttcattagagcagtagataaatgaattagggctgtacagagtataaatccctgcggcacacccctacatatgccccatctagaatttctcaaatatccaggccacatctttctgtcctagttacaatgttaattgccaattagcatgtttatgtcaagatttcctgtgatagcatttttctctgggatctaataacccagtaaccttggacaccagcattatatagtgatatggaggtggattttggattcaaaatgtgtgctaaagctttgcaataatagacaacttaatttctgagcttcagtctccttgtctagcagagataacaacaggtaccgtgcaccttcttaaggctagttgtatggattaaatactatatacatgtaaaattattagcagatagtaggtgcttaattataattgtagacatttgtcaagaatgactcatttggccaatggagtgttggcaaatgtttacttaataattaattggctttctgagagaaaaagctctggtttggagcatttgatgatttccctggtataaacactcccaccaaagcttttgagctaccatcatggcatcatgaaaggcagagttgggtagcgatatatgcagtcaaatggctcttgggagacagtgccagccagtgccaacatccccctgtgtgtggcccatgctacactcatactcccactcacaagtaagattgcagcattaatatgtgagtaaaaagatacaaagaaaaaagatttccattacaaagagctcccgtcaggtgctgatagtgcttgaaaaagagatggttattttagttacatttataattgtgaagcttcttctgcttgctctggtatatggaagtgccagttattctttccaaatgtgcttggttttgtctttctttacctctttctccctcaccctccctcttccaacaaatgcctcatatggtaacagttaccaagcaaagtaagggattttatgaaaaattccaaggtttgagtaaaaaaatgaacaccaaaatacccattttattagtataggtagcatccagttaagagttgggtataaaaagaaacatttgcctacccaaagaaagcagcatcagaatcttggcataagaaaaatagcattgtttagtatttgggtgtttacatattccttgtgagggtgaatgtctgaatatgctcattttcatattttaagtcatcatcaattaaacatttgtgggtgtatttcttgtgggctgactccagtggctgtcagtgaaaccaagcagctgttgggtagatatggaacaaaaacaccctgaatgttacactcctgattgcttcccctggcacaggtagaggtacttatgcacagggaaggaaatgaagggcatgcatccaggttcctttctagctgtctccttagaaatcactgctttttggacagtactgaaagtatgacacagctgagacttggtgtatgtacacacacagtatcatatttgattgtgttggttgcttccttctggcaatcctttggcaggtggtatcacattcttccctctaaagagcattaccaactgagatttccctttgtgcttagtaaatatttaggcattgtagattgtgtcagcaatgattccttttatgtttcaaaggctggaaaatttttcttccttgacacttcactgttgttgatttggggaagaggtatgagccaaatggacattggacaaggaattaaaatttataattgccgcgaatagtaacttttccttagctgctgcttcgtacttgaaaatggaatgccctgtagcttgggaaccgaattttatggtggctctgcttttgtgatatttcattcaatccatttaacagttagttgtatttttcaattctaattaacattggtgtttttaatatatatcttaaaactataatttttgagctaagaagccttacaacagatacaccagcaaagatgactagaggtctacaagagtgcatcataagtagagcaatttagatggacttccttctgaactgctgcctaaaaagtttgttactcaatcttatcaccatagttcagcacaaagttaatgaaaatagggctgtataattttgttgtaaaacatcaagtacctgataattatcatcaccatccatctttatccaccatcatcaatcaccattattgtatttttattgcttggattaattcagtcctaatagagcataatggtatggaaattatttaattacattataagtacacactctatcaagtcagaaatcatttagtcctatgacagaaatccagcaacaccacctcctggtaggattagctatatatgcctttaagatatataacttaagcatgcagagggatatatagattgactgacagctgacttttcttctatttctccatgttgctacacttaattttgcctctatttcaaggaacttcaaacacagtgtttaaaagaatcatttaggctctccctgaatatacaaattttggtacctcatcattgtagttctctgataaggctcttggaatccctatttttgacaagcatgccagatgcttctaataacttgtctggaagaacatgcatggaggaacacaccattctgccctcataaaagtcattcatttttctgtctgtttttgttatatcactgcccaaatggaatgtgactatcaatacataataatttcagttactaatatataaattattagcattaatttgcatcaagttatactcatcattggtaattaataatgatgatgaatgatagcagatgtatatatggtgcctactatgccagacattcttaaaggatttgcacgtattaatccttacaagggccttcggaggcaggtaatattatatccccattctctagaggagaaaactcagctgaaggaggctggtcactgaatcacagaaggaagagagcaggctgtagaatcagatggcatgggctctatgtctgcctgtgccacttactggctgtgtgtcagtgacaagggtccatcatctcttcttgactataaagaaaaactggggatacagctgctgttaactccagagacaggtggtgagaattccatgagctgaagtatacaagtatttaaaggctagcctgaagagtaggcatgctctagaaatgttaactgttatcaccttttcttgtgacaaccctgcctttccaataccttttctaatgagttattgtcaataacatcccagtgctgctttctgaactgtgactatctttagctagtaaggagtgtttggtgtctcttttttagaatttttcttttctttttgaacattgaagagcgttcaatttttaattaatcttaataggcacacataccaatattaggcataattaataaccttattatctcattagaaaggcagaacacaatgcacataaccaggaaactaacgtacaagtcttagtgttcattactgctatgatattcattcacatgtttagtagaaaagaaaaaaaacaaaaacattgagccccttttcctaccggatcaagttacagatgttagcctgttcacaaactttcccacatccaggggcgatgtcccccagcacaccatccctccccagctgcttcctggccctcttgcctctgaggcatgctcacaaaaacctgtgagttttgaaagtattttcacctgccagcatcaatgagaaatcttctgcaagtcccctccccatgttcatttctgtcagttccttgggttacggttctcagtacataagtgtcattagcttcacctgggattttttaataaacgcaaattcctgaatactaaattcggattcagtaggtctgcaatggatctcaggaatctgagaacccccaccccgccccaagcgaacatgacacttctcttcgaaaaacactagcttcaattgtagagaaaaccaaaagtgcacatgaatggaaatctgggacatagtaagacaaaagagactgaagtaggaatagcaagcatttcaaaggaaaatgaggctgtcccttctgaggatttcatattaacaactggtgcaaggaaagggaatttgcagcagagttcagaataggggcagtgaggaagtggagttgaatctgagaacatgaataaggaaaccactctgaagatgagcatgtggcataagggaaattgccaccggaatgtaccctctctacttccctaactcctctctttacttctttggcccgttctttctgccacaacctaccactaaagatcctgctttgaatgaaccaaggtcccaggggattgttgcataggcataagggttgttcttggaagcctctgggtttgttgatacagaggatccctatggctccttgatgataattcagttgtgaaggtatagtattgagaaactggtctaaagtttttatggtatatatattttaaattttatttaataaatatataaaaagcactgttctatgtgttttaaaaatactaacacattgaatcttcttaagtactttgtggagtaggtaacgttattattccaatattacagatgaggaaactaagaagttaagtaacttgcccagagggtataaagaggaagggacaaggtgattgttccatactttaaaggaaccagattatcatatttgtagaaagaaagactacattttgagtctatcccaaagagtgttatttgaagtaattagactgtgtagctctgaaagaattggaacccgcaattcaaaacaatttaaactgttctggagacaaagctaactctctggtggggtttctttcttctgatgataaatttgggggtcacttaatccaggacagttcctgcatttatggaaaatgagcatatcgaggtaggattaaagaagtgaattcattcattaggctctatgccatcatggttcatttttttctaaagctgagccaagaacatctgtaccccaattttttattttcttggccaaaaggggacaaataacatctcacactaagaacattaaaatatttaccaaaggtcttcttttagcaaagaatatttcttcattgcaatgcctctgaacatcttcctgaatcaattaatattcatctaaacttttattttctatgactaagtaacagtaatattcataatagcaactgacattcagtgagctcttattctgtggtcactgtttcaggtgttttacctatattctattgtatgaaatagcacaacttactctgattaactcaattttattggatataacagttatttttcaatttctattatgacaaaaaatgttttattaatcatatctatagctaaactatgtaaaaatgtttgtaattatatccttagaatcaattttcagaagcagaattgccagtgtaagagtatactttaagaaaaaaattcagcacattttaccagttttcctgccaagaatgttataccaatctatattcccaccaacaatgtagcaagacttttgtgaaaagtttttttgtttttttgttttgagatggagtcttgctctgtcacccaggctggagtgcagtggtgtgatcttgcctcactgcaacctccacctcttgggttcaaacgattctcctgcctcagcctcccgagtagctgggactataggcacgtgccaccacacctggctaattttttgtgtttttagtagagatggggtttcaccatgttagccaggatggtctggatctcctgacctcgtgatctacctgactctgcctcccaaagtgctgggattataggcgtgagccactgcgcccggtgtgaaaagtttttaaagtaatgaattgctagttagcaacctctgagttttttaaggtgttgtctagcagtctttattaaaaaaaaaaaacagaggtccaatcacctatttccttagaagagggaatcaagggtatatttcagtctgtctataatgcactgctatgtaattactagggaaacttctccaaaagtcacaatgggtaaagtgttataaattctgagtcataagtaaagtttctactatgtgagagactctcattccctgttgtcactgagatcattaaggtctcagttcacatgttacctttgagagaagtttttcctattatcttatctaaaatagtcttcccaaggtctattccattactctgtcttgttttcatagcacttactaattatctttgtttattactttattgcttgtctccccattataacgtatgcttctgggagtcaggagctctttcttataccagcgattttatcacaagacctaaaagagtgcttggcacatgaaagatgtctatatatgatgaatcagtgaatgagtgatgaatgaataaatattggtcctcttaaatcccaaagtcctctgtttactatttatgcacagctattagtctgtagtacaacactgttaagagacaaaatatgcatatggggcaaagcaatatttgtaactctaaggtactcaaccttgtagatgaagataagtgaggaagaaccagttattagagtatcaatggcattggtcatttggttataagcgtaagtgaatttccccttgaatttaccctgtgagttgctatttaatggtgttggacagttacagataagtttggtagaacttttctctttgtttccttaagggttttgcctttgggtaaccaccttaatttcttcagtccctgtcttccatggataaagtcttagcagagctattaaagatcctaatgtcaacttctcttaagattatattgtccattaatgggtgttctgagagatgttattttgagatcaagtgctaaagatttacaatacacactttaactgggagaatatgcttgtttcactaggacagatatgtttctctatggtatccccagcacttacagtaactggcacgtaggaagcattaagaaaatgttgaataaatgaacaagataatcaaattctgtcttgtgaagaaacccatttgggatctattatatgttctgggtaattcctctgagcatcagcgaggatctgtgcaactaacactctggtttatatctaatttgaactgctgattgtgggcagtagaaattatttcagtagaaacttagctggcttgaatttatgagatattattagtctcattaagaaaaatgtctaccgacttctttaggaagctcatgtcttcagaaagtttctttgagatttcatatagaattccttggttttaataaacgttcctgacttctgcatatttgctattgatgcaacaatgatgcttggatcaaagttactttgtcactttctaattcatttattttagattactcagctagtagaaaacaatagagtcactttgttgctgtaaagtctcttcgtagtatttggtgggattgtgctattcttcagtgggctggtaatccctataaagcttagagaaacacagggctctttaaacgatcctttttctcttttctgttttaaatttcatcacttggttatttttgccacctgcttggattgcctccttacccaaatctaaaattcctacagtaaaataaatagaaaatgtggtcgctactctccttcaaaataatattttcatttctttggacaagtatgttaatttcttcatatgcagttgtcaatggtccaggtttcggaaccaaatagcctaaatttgtgtctggaccccactacctgctattattgactttgggcaaactagttaacctttctgtgcctcagttttctcatctttaaaatggggctattaagagtacttctctgtattgtcattgtgaattatgaatcaatacataaaatgagtttagaagaatgactggcacttcacaagtgctcaatgttaaattgtttttattgggaagaaatgaaaatacttccttgcttaatgttggagaaaagaatcactaacccatcgcatctctaagatgatgatgataattgcagttgccatttattacatccctactgtgtactaggcactgaattcaatgctttgtccaccttatgtaagtgaaatctcacagcacagtgaagtattattattattccatgttaccaatgaggaaacaggagaccctaaaaactgagttctttctctaaggttaaacagctcataagggatggagttcagatgtgaatccagttctatctgattttaaatcctgttctcttaattgttatgtcatgtcatctctacagtcttcaataattgagacttaatgttctttgattactaacatccagtggctattccaagggaattcaaaacccttgtcttcatgactttcaaaagcaacccaagtcctgaaaacaacatttttgtgaagtatattagtgtaatccaaaacatgataaacactttttaaagatatttgcagataagactcccctaccctcactgttacagtaacagtgtaattttccctggtattgctctgaacattaaggaattaaaacacttgaggctggacttgtcaagagacctatttttgttttgttatgttgtaatagctgttgtttctgatatttttctttttccttcattctgctttttctttctccaatcttggcttaaagggcaacttcctgtgcatgttcaggaatctgtggcaaagggaacaagtatgataatttgtctgctaccatttggatgttactattgtctcagcagccaggaaaacagacagagcccctgtgagcatcattgtgtttgggctgcggctttagttgccaaagtgcagtttttactgttggcatttccaccacctgctatgggcaataaccatcgaaaggacaaatccccttgtctgtgatttttctttctaggcttctttggagaaagactgtgaaatgatttattcctctgtacatatgaagctatagtgtattctccactgcatagttttggcctctgatactctctgttcttaggttaatccattaacttgcctgggggaaaagggacaggaaagatggatgaaggtgttatgaaaacagagatgagaaggatcttaaaaaatcccaaccactgccttttcttccctgttcccatctgctcctgagaagtccttcagaggatgccaggcctgttaatacctatactttatacctgttgttttaaatgaggcagttcttcctcactatatggatataataaacagttaagctgtcttcctctatgcccctcaaaaggagacaaacacacaagccctacacaaatggtatcgtgcccaaatgagtgttggaaatgctggataaaacaaaggtaagtaggtcttttcattgcaggccttctcagagccttaaaaaaaaatcctcactcatattttgaatctctaggagagacatatagtatacaacattctccaaatttgtttgaccttggaatgcttttttttttttagaagcaacttgagggacaaaagttctgtagaacacgctttggagagtattgggatagattactttcattgcatttttgcaatttggtttataaacttaccttggagattgggcaaattggctggttagtttagatacaatatatttttttcgggttgcaattgtatttttacagtagctagcagaagctgtggttctgaaaagatactataagaacattatcttgtgttctagaaaatagaaaatactctattttcttccccacctccatttttcccctgtctttagaaaaattaaagtatacttaagaagaggaaacaaagtgagtggtaaaggtgtatgcctctatagatggacaggtgtgttagttacattatatccaagtaatgtgtaagtgggccttattaatgagatcctaagaaactataaaaaatgaacataccccagatttctctttgtgtacactttgaaagtgtttttccatttctattaaaaagtttaatttgtcatgctcatgaaatcaacataaatttatggaggcagaacataatacagtaaaaagacaatgtgatccttttcatgtggcatttttaatacattgtatcacaaattacttcaaagaaacaattaaaagaacaaggaagaacttaggaggttcttaaaatagtatgtagcacattttagaactcaagtgacagagctttcctgatgggcccaagtcctgtctcctctcaccctttttttttgggggggggtggcgggaacaaaacaataaacacctttattacatgggtgaagacaaaacgaggatttatttgcctttccgggccttgatcttcctaagatagaactccaactctttgccctctagcacatagccatctgctcggccacatccacacagttctctcactctttcaaaatgtcagcaccagttccagaaggagggactggcccttgtgatggccataatgtaaagtgttcacacgaccaggtagcatttccattcttagaaagctacgcttcttagaaagctacgctacttgattctaagagatcagtcatacagacgtgtttttattcctttcagaggcaattcatttcatgaaaaaatgctgaaatgaaaacactttatagttaagcttggtgtagtcataaccacacatagctgtgttctgtcataatttgtaaattgagctctgtcataatatctatttttcaggaggctctcagttaaattttcttaaaaagtctttctgattatgaaagtaatgcatgcattgccctgtggcatattacatattactctctcatagaatatatagagagaaggtggcagtgaggacaattctgtggtcacctggaaggttttcctctggcacaggaaagacagctgtcctatttctagttgataaagtgcctagactgtgcattagaggccaaacattgaaggaagtcaaattgcctttttgttgattctaaagtggtctttgtatcagaaagtagaatctgaagaaatatgctgcaagccaggatgattatagttaacagtaatgtattatgtagtttcaaatagctagaaggaggatgttgaatgttcccaacacaaagaaatgataaatatttgagatgatagataggccaattactctgatctggtcactctatattatatgtatcagaacatcactatgtgcctgatagattatgtataatcatttgtcaattaaaacaaattagaaaacaacttacttgtctttttgctaaatctggatgtggatccagctgaatataatttcttcctagttctatgaataggatataggtcttggtttccatggtgttgtgtgacttatacttttgcttatctttgtcagtacttttgtgggaagaagataggggctctatcagaggttgttagcttggtgatgttttcacccacaaattcttcatttgttcttagaagttttctcatttctttgaactttccattaacattcaatctttcacttatatgaaaaatattttccttcctcctctttttcctcttccgtactttctccaaattcaggaggcagataatggtaattgaaagttctagggacacactgtgagctcaaggtccagaaaggttagggaaagtctttattttgaactgtaggtatgttttaattccttctggagactagcactcctcagggatgctgagactggcactggtgctaccggatattaaacagaatggatttaaagtattctcctgtattaagaagattattttcaaaagaaagctctattttgtagttattgtcactttcctaaagatataactttcctggagctgtggatcgccacaatattgatggcccatcccagcactatttaaaggcagggctttgtcatattttttataatatttgcagcttggtcaaataatatttattaaatgattaaataaattcaacagcacttagaaacaatagaggcagaaaatgaagttgtggagttggggtgtgtgtgtgtatatatatatagaattagtacattttcacactgctgatacaactgagactgggcaatttgcaaaagaaagaagtttaatgtactcacaatttcatgtggctggggaagcctcacaatcatgatggagggtgaaaagcacgtctcacatggcagcagacaagagaatgagagccaagcaaaagtggtctcctcttataaaaccatcagatctcatgagacttattcactaccatgagaacagtatgggggaaactgcccccattattcagttatctcccactgagtccctcccgcaacatgagggaattatgggaactacaattcgagatgagatttgggtggggacatagacaaaccatatcatacatatacataggtcagattggtaaaagttatagaagcaaatgttagaaaactattttgtaaagttggaaagtagaaacaataaaaaaacacaattcaaagagataagcattttcactggtgtttttttctggtgtgattcttccagagattattctggttatccattgctgtgtcacagaccactccaaatttagtggattaaaaatgataaatattttatgatgtcatagattctgtgggccagaaatttggacagggcacagtgaagatggtgagaacagtttgtctctgttccctgatgtctttgatctcaactgggaagaactgaggagctagaagtgactggcatggctgagacctagaattacctggaggcttctttattcacgtgtctgtgtctgagcctggaatgggatgatttgaaggctgaagttagctgagatggtgtggcttttccatgtggctcaggcttttcatgcatggtggctgcgcttctgagagagaagtcctgagaggaagtatctggaaagggagccttccaagagaaccaggtggaagctgcattgccttttctgacctatcctctggaggcacacagttacatttccaccacatttcattggttacatgtgaatcagaccaaacagattcaaggggagaaagaatgagcctcacttctttgcgcaggagagtcaaggtcacattgcaaaagagcgtgttggatggaagatgttacatctgattttgaaaaatatacttctctacaatattgtttggtcatcttataaaagtaaaaaatagtgtacctttataatatttcattgagaagtgtattaggcactttatcttgctaatgtaagatggttcactttaaagtgctctgtgtttgaaacattgtctttcttcacctttctaaagaacgctctaagatgatatatggcaaccaatcaatattacttttttcatttgtgtagcttatttaactacaactatttaataaatattatagggacattgtgttattccattttgtgaccctataaaggaacacctgaggctcgataatttataaagaaaagaggtttaggccaggcacagtggctcacgcctgtaatcccagcactttgggaggctgaggtgggtggatcacaaggtcagcagatcaaggccagcctggctaacatggtgaaaccctgtctctactaaaagtacaaaaaaattagccaggcgtggtggcacatgcctgtagtcccagctacccgggaggctgaggctggaggatcgcttgaaaccaggaggcagaggttgcagtgagctgagatcacaccactgcattccagtctgggtgacagagcaagactctgtctcaaaaaaaagaaagaaagaaagaaagaaagaaaagaggtttaatagccaaagttctataggctgtataggaagcatagtgttagcatctgcttagcttctggtgaggtctcagggaggttttactcatggtggaaggcgaagcaggaacagcacatcacatgacgagagcaggagcaagaggagtagtggggtgccacactctcaaacaaccagatctcatgaatttgcagagagaactcactcattactaagagcagggcaccaagccattcatgagggatccatccccatgacccggacacctcccaccaggccccatctccaacataatggattacatttcaacatgagatttgaagggaacaaaacatccaaaccatatcaaatatcatagaagaaaaaataaacatatgggaacatataagtgagaaaataagtttgtgaattatcaaaaagtggaaatagtaatatctaggcaggttagcatacataagtgatgttctagtggttctcaatctttgtggcagaatataatcatctacagaattcaaatcaaaacaaaacaaaaaaaactctggtaccctgctccctcccccagaaacactgatttaactggtctaaggtatagaccaggcatcaatatttaaaagttccctaggtgattgtaatgtgcagccaatcttgagaaccattgctttaaacagtttgtaaaatgtacgaaacagggaaagatgtttaattacaatgtttagttacatgactgaaattttatcaataagatctaaattctaatctaaacagaaattcatttgcctcttcattcttcaacagattagttcccagaggacactgttggattcatatctgacacgtaaataaagcccacacaccaatatccaaagcagaaagctgaaagggacctgtttccttgataatatcattgaaccattgaaatattgaccccataattgttccaattttgacttctaagaatgtagaatatttgtattttgtttcaactagatgttggaaaattctatagtttgcacccgaaagcgtttgaaacattcctttgtataaacacattttcttgattgtgtggtcaatctgctggacagatccactatgaattcagacagatctgggtttgaatcctggctctgctaccgtttaatgactttaacaatcttatttcatcatgcctccaaaaactgggagaaaatagaatacctgtttcagaaaatgattataggaattaaaagcatccattcttttattcaggaaacctttgagcacatgagtattccaagattgtattctgtacttggagtatataggaatgaacaagacagccacacttagcagaatgggagagggaggcaataagaaagttaaagaagagatgacaatgtcggtttctgatagaagctgggataaaaaaaggaggtagcaaaaaagtgtgaataggacaagtctgagactcaaatgataaaaggtagctctgcaaggaccagacaagcacatctaagtcagagaattgttaatacaaaagagtcttatggcaaaaataagattggtttatttgagaacaacaacaaaaaaggtcagagagcctggatctaatcagtaatgcagtggagagtgagaaaagtaagattggacgggtaaacagacgactgattaggtaagccaggaagaggagttgggatttattataaatctcatgatcagcatttataaaactttaagcaaggtgctaaattatctaattttatatataaaggggtaagagtgaagggggaaacctggttagcaaggtcttgtaatagtcccagtgagatatgatggtgccttgttttagggtggtgctggtggaagtgaaaaaatatatgtttaattttgctgtgaacccaaaactgctctaaaaaataaggtctattttttaaaagtatataaatgttagtaaaacacatagatttacatggtgggcactcagtttattagagatagggtctcactctgtgccccacgctggaatgcagttggcatgatcatagctcactgtaatctcgaactcctgcactcaaacaatcctcctgcctcagcctcctgaggagctaagactataggcatcaaatgcccagctaattttatttattatttatttatttttttgtagagacagggtcttgctatgttgcccaggctggtctcaactcctggcctcaagcagcccttcttccttggcctcccaaagtgttgggattacaggtgtcaaccaccatgcctggccagtaaatgctattttattcataatgttatcattaccattagtacaatgtggaagcaagatctggctctgtcattagcattgctttggtggaaagatttactaaataaagcagagagacttttccaaattgtatttattatctttaaaggctttcccctgaaggtacactgggatactaagaagacctgaatagcttaagatctctacaaaaggattccacataccggtttgggacttctaagggaaaatgcaaagattcacaacttttaatagacagtgatttttgtttctatatctgacggtcatataattatattttagcatcccaacacagttttgccataatggtgtgactctatgattgtgttgtattatgtaccacttcaacccaaattagtttaatgatgctatagaggcagagttgttttcccatcaaaatgggaacaagtatgcaaaagcaagataaacactatctttcagagtgatacattcaagcagcattggttttaagattaagcaaattcccactgccttgctttattagtatacttatgagaagctactttataggtcatataactgaagtgagtttataattatggcaatgggtctacattggaatgtagtttatagttactagctcaaatatctctgcctttcacgttatgttggaaaactgcatgctatctttatttcttagtttcacatctgtaaactgagattaagatctgcttttctgtttaaagactattgcctacatcagagaaatcatccttcagcacttgaaagactttgaaaacagaggcttcctaggcagataatattttgtttactatggttggttttcttttttccttttgaatagactttattttgtagagaagttttaggttcatagtaaaattgagcagaaagtatagagttctcataaacctcttcctatgccatcacacatgatagcttcccccatcaggagcattccatgcctgagtggtacatttcttacaattgatgaaacagtattgacacgtcatcacccaaagtacatagtttacactaggattcactcttggtgttgtacattatcttcatgtgtcaccatcataatatcctacagaatagtttcattgccctaaaagttctctgtgctgtgcttcctcattccctcctaaccactgtcaagtaatctttttactgtccccatagttttgcattttctagaatgtcatatagttagaatcatatggtatgtagcttttcagattggcttcttttacttagtaacatgcatttaagtgtcttccatatctttttttaatatatacatatatattttttattatactttaagttctgggatacatgtgcagaacgtgcaggtttgttacataggtatacacgtgccatggtggtttgctgcacccatcaacccgtcacctacattaggtatttctcctaatgctatccctcccctagcccccattccccaacaggccccggtgtgtgatgttcccctccctgtgtccatgtgttttcattgttcacctcccacttacaagtgagaacatgcagtgtttggttttctgttcctgtattagtttgctgagaatgatggtttccagcttcatccatgtccctgcaaaggacatgaactcatccttttttatggctgcattgtattccatggtgtatatgtgccacattttctttatctagtctatcattgatgggcatttaggttggctccaagtctttgctattgtgaacagtgctgcaataaacatacatgtgcatgtatctttatagtagaatcatttattatcctttgtgtatatatccagtaatgggattgctgggtcaaatggtatttctggttctagatccttgagtaattgctacactgttttcaacaatggttgaacaaatttacactccccccaacagtgtaaaagcgttcctatttcttcacatcctccccagcatctgttgtttcctgactttttaattatcgctattctaactggcgtgagatggtatctcgttgtggttttgatttgcatttctctaatgaccagtgatgatgagcattttttcatgtttgttggccacataaatgtcttcttttgagaagtgtctgctcatatccttcacctactttgtgatggggttgtttgtttttttcttgtaaaatttttaatgttctttgtagattccggatattagccctttatcagatggatagattgcaaaaattttctcccattctgtagattgcctgttcactctcatgatagtttcttttcctgtgcagaagctctttagtttaattagatcccatttgtcaattttggcttttgttgccattgcttttgatgttttagtcatgaagtctttgcccatgcctatgtcctgaatggtattgcctaagttttcttctagagtttttatggttttaggtcttacgtttaagtctttaatctatcttgagttaatttttgtataaggtgtaaggaaggggtccagtttcagttttctgcgtatggctagccagttttcccaacaccatttgttaaatagggaaatcctttccccattgcttgtttttgtcaggtttgtcaaagatcagatggttttagatgtgtagtgttatttctgaggcctgtgttctgttccattggtctatatatctgttttggtaccagtaccatgctgttttggttactgtagccttgtagtatagtttgaagtcaggtagtgtgatgcccccagctttgttctttttgcttgggattgtcttggctatacgggctcttttttggttccatatgaaatatgaagtagttttttctaattctgtgaagaaattcaatggtagcttgatggggatagcattgaatctataaattactttttatggttcaatagctcatttctcctgactgctgaataatgttcccttgtctggatgtaccacagtttatttattcattcacctgctgaaggacaccttagttggttttaagtttgggcaattatgaataaagctgctatgaacactcatgtgtagatttttgtgtgaatataagtttttagctcctttgggtatataccaaggagcacaactgctggattgtatggtaagtgtatgtttagttttgtaagaaggtgccaaactgtctttcagtgtggctgtaccattttgcattcccacaatctatagatgagactttctgttactcgacatctttaccagcatttaatattgtcagtgttttaaatatggaccatactaattgatgtataatggcatctcattgttgttttaatttgcatttccccagtgacaaatgatacagagaatcttcatatataattattgccatctgtattactttttgggtgaggtgtgtgttcagatctttggccatttttcatctgctgttttcttattgttgaatttcaagagtttttaacatattttggataacagtcctttatcattatgtctttttcaaatatttttcccattatggcttatcttttcattctcttgacagttacatcatgcttttaattgtagaattagacaacaatgaaataaccaaagccttagtaatcttaattagagattatcttctattattttctatttttcttgtttcacctgagttagaaaactgacctgcactgacttcctctttcacaataattccagtgaaatgaaagtgattagaaagtcttagcaaattcaccaaaagttagagccagaagactcacatttcaattctctacctaaagagaaggacaggcagaagccaaatatgtaaagagtttgtcagaagtatgccttggagccatgggcattgttcattactctgctgaatttatcttatggattttcccctccacattaatgtttcaatgatcttggttagattgttgaagtacaggttcctgctaggcatttctaactttttgttttaatattctcttatcctgttcatttactctcatttttccttttagaaatttactgccatcttctcttttagaaattcttttgacaatctgaaggaatgcagttatttatccctatgagcaattaaatacttttaatgggaatgtcatgtttttaaatcacatttcttataagaaaaaaatggtgtttactcaaatgaatgtggtctgatggtgatcctgatctatgagcagtaattgagatcatggaaataaatacaggaaagctggctccctgctcccttcaataaccaaatctatggtttagacattttttagcactttgctccaacctgttacagattatcaacattatatatgatgataataaatcagagcaccactttaaaacacaaaagtggttgcctctcagtgctatggcaaacatagaattttgaactttttgtatgactggtatttttttaagcgactatattttaataacgagctattgcatgtgactttactatgatgctcaaatatgttctatgtatgacggggaggaggaatgatgttaccatatgttggttctgaattcctattttattttattctcaggtggaaaaaagaaagaaaaaaggattcatcagcaatagggcaacttagagcggacacataggtactatggcagtgataagagatgagatagatcatcactatgcccttttcaattcttgggaactgtcttcgttaaacagttttagatgcaagggtaatttttttcctatggtgattgtagaaagaacacccagagattgggactagaagtcaggatgtctttagccttacttggttgtcagctaactgtgctgttttggacaatgcattcttttttggtattctgtttatcccactacaaaatagagatagtgagaattggattaccattgtcaatatgaagcacagatgaggtaagtgtgaatcacttgaggatatataaagtcatttaaaactttaataattataatacgataatatagttgttgatttagtttagtttcttacatatgatattctacatattcttatcacttcacagggaagcattgactggccaaagtaatggtgggtagagggaatcacttaccttagcttaaagagatgccaaaatctaggacctattcagagttatgaattatattttgttgagcagtgttcctccaaaattcatgtccttcctggaacctcagaatgtgaccttatttggaggtcacactggagatgagtgggctcttactccaatctgacttgtatccttataataaaaagggaagagacacagagacagatgcacacacagaggagaacattgtgtgcagacacagacacatgaggaagatggccagtaatgatgaaggcagaaattggaattactccgtaggaaggcaaggatcaccaaggattgctgccaactaccaacagctagaagactatggccatgctcacatcttgatttcagactgtgacccccaaaacagaaatggtgagaaaattaatctattaagtcacccagtttgtggttctttgttacagccgccctaggaaactaatacaggagtcaaggaggctgctgaacccagctggacactgaggggcatccacagaggtcaccaaagtggagtggccagaactagattttggaagccagatatggaggcaggaatccaagaagcagggagcctaatgaggaatagtcataaaaagagctcttggcagccgcctgttccagatgttggtgttgctgccagtttctatctgctcagtacccaaggcactttaatggactgagataggttggacaggttctgtttgaaaaaatcccttacatgcaaagtaagataaaaccaaaagccaaagtatcttgctttaccttgaagaaggaagcaactctccctgatcacagagcttccctacttggccataggatagcctcatgtgcacttagctcaatgttactctgagtttctttctactccgtctttctcgatataatcctaaaagttagggattcccaggaattatcatggaacaactggcttatgtcttagtttcctatcactgctgtaataaatcacggcaacctttgcaatttaaaacaacgtaaaacctattatcttagacttttgcaggtgagaagtccattatgggttgcactagtctaaaactagtgcaacactttttaccccctgaaagacatcaacactttttaccccctgaatctaaaataaaagttgaaattatttttagaaataaaaataaattaaaatgtttcgtaaaccactttggtttcctttctggtgtctctgaggcaaatgttttctgctcatttgagttgttggcagaatttaatttcttgtggttgaaggatggagatctggggtttttttgctggctgaaaactgagggccattggcagcttctagaggctactgtattcctagcccatggtgcctttcttccgtcttcaaagcctgcattcttctgcttctttgtccttttttaaagactcatgtgattagatcaggcccacccagataatccaggattatctccctttcttcaggttggctgctgaacaacctcaattccacctgcaacctaattcccttttaccatgtagcctaacatattcacagctctggggattaggatgtggacgtctttcaggagccatgatccttccttccacacattaactgcagctaagcaacatgactccccatcacgacagagtagaaggagaaactgaactgtgagaggggaaacagctttatcaaaacatagcaaatgtcaattataagcaaaaagagaaagtcaagctgcctataatatgtgcaatatatttattcttttataaacttgctgatatggaaattaaaaattaaatctacttaatggaaaatatttgatataagaacatcagacatatctttgataggcaataaattactttatagaatcgtttagcatcttatcttcagggctattttttggccctaactttgagcacattaattttgagttcctcttgtttctcttctatttgttccctcaaacccaatgtatcagaagttattttaacttaagttttccttgcctaattccatccacttatccccagaattgtttcatctcatgtatttattacactgttcacatatcaccttctattttcatgccccttgtaaacagcctaagaggcacattactggtaaagcctcagggtaaacaggcattgcctcccattttgatttcagctccatttaatgactttttatacccaatgtggacacatactcatttttagttttccaatgcagatttcagctatattttggctttattcctcttttttcatcctttttttctttttttttttttttttttgagacagagtcttgctcttttgctcagtctggagtgcagtgacatgatctcggctcactgcaacctccaactcccaggttcaagcaattctcctttctcaagtaatcctcctgaatagctaggattacaggcatgcaccaccacacccagctaatttttgtatttttagtagaaacgggtttcaccatattggtcaggctgctcttgaactcctgacctcgtgatccgccagcctaggcctcccaaagtcctggaattacaggcgtgagccaccgcgcctggcctacatccattttaaaatgaaaaaatatatatatatgtaatttatttgaagaaagtctattcatttacgtaacacttatcattgagcacttcgtaggtacctggcgttgttctagacactggaaacagaccactgattctgatgctcaagggccctgttggtggcattgcctttggtgcatccttttctttcacctcttatactttcgtgttaatacttccctacatggattgttttcttactttgtcatgtgtacactttccctacatggtgttttcttaccttgtcatgtgtacactttttttaccctttgcattatgaaatttttgtatcctgaatctcgtttggctatgactcaactttttaagctaactctatttggaaagagtctgattaaagaaaatgtcaccaaacggttaaatatgttatttctgtgcatgtttgttatttgtcaaggggtttcattttaacccaaatgaataactttttattggtggattgtacccatcctcgttagatcaccaaaggcagtatgtattctgatagggccactttgttgtgcctctctgctttcttttctctctctttttcttttctttctttttctctctctctcctttctctccttccttccttccttccttccttccttccttccttccttccttccctcctcccttcctcccttcctccctcccttcctcccttcctcccttcctccctcccttcctccctcccttcctctctttcttctcttgcctctttacctaatgtctcaaatggtaagtcaggccctgacctcacatgtgacagttaaaaagatgccagtgacatctttccccaaagcaatagaaaggatatttttcaactaacgatttaaataggtcaaagcaaacaggatactcacattaaaggaagaagaaactgcatgttatagaaagacctatgcattcagatacctttgcctgccctgaaattccatttttcaaattcatttgcctgttagctgaggacctttttaatggaactgatgttagtgatctcctagacctctgacagttcttgagagatagcaaaagctttccctgaagtgctagccatgtagcttatccctttaggcactctattgtagaagtctccctgataaagcttcctgtactcaaattcttaggggcagggaggagggataaacaattggaatacttttttgggatattaataattggttatttcaaaatctaaaaaaaaattaaaaataatcatttgaggaactctgttaaattttttaaaaagtgcattaggtttagatgtgatgaagcaacaaatgcaacagatgttgcaatgccaatcagatacttgactaagacaaaagtttaatgccaaactgcttcaccagaaatagcttcctacctgacagaggacactgaattgtgtcaaagtattagaggaggcaattggtaggtaaagataattaaagggacatccaacatgttttgagttctttctccgtatatatggagagagagaaaagggtatatttgtgccttggattcattagtaaaatgcattagctatagctgactgatttgcaactggtgcctgcctgaggtctccaaagagaggagatttacatttaggttttaagcttgggaaactttgaaagttcttataaaaaattagacagtcatttagaaatgtaaatatactgtatttctttctggattacacatttgctgaaattcaccttttagtttttttagaagggagcggtattggcatacgtgttacacttttttgcacatcacttttgaaatgaggttccagatggagtctcagccccagagtgtaacaaagagatcattggttacaacctccttcttacagactaacacactaaaacccagagaggttaaggaagagatttaaaatcacacaaatatttagcagcctggccatccatgactaggacccaagttaatcaaatttccatcatagtctttttttccttcccttcatcagcattatacttgcttgagtaaacatcttaaatatagaatgtttctccttttcattaagaggtcatctaaaatagtatgttctctattctccattaaacatagtttataagatttctttgcctttaaaatcagtttaattagggtaaaatttaatacataattgatcatacatctccaagttgaaacatctattctgtttttaggcttagtttagtcatttcccatttgtttgatttaaagtagggttgaaggggcacacagccccgggaaacttcagtgtaaagtgccatccaactctagccagattcttttatctaatcaccacactccctgaagtctctgataattatcaataaattgggtggtagataaatagcagtgtcatgagagaaggaaaaagctgaaggcacactagcagtgactctttctacctgtcagcaggatggaggagtaaagacagatctgtcctgtttgtcaggagcagaaagtatgctggcgaaaacgaactcctgggaagggaaggtgtcaggaagatgaattaccccaggaagccaggactgctctcccagtggagagcagctcacttggatataatttgccagctgtccgtcttgtcctcgtgcgtctctgtctttttcctcctttgcgctgccagcaacaagcctgtgctgtgtagatctagtgcagccacagaaccttgggactagctgaagggccgctagacctaatggcaggggtaactatttttgcaattgtgaatattcagcatgcacaggcttcctatcagctctcccaggagctctctgagagatggaccctgtgaggaaacatctttaaatgaacaccttagtagagaatgatcctgttaggtgaataaaaggctgattacatacccagaggtgagccataatgaggctcagagtaactaaatgcagcaatctgctgcactttgtatctggacttgagcctgagcatttcaaagtagcatctggaaaagaaaaaggctctggggaaaatcacacagtagacttgaaatatttcatttttttttctccaaagggaacttagggtagatttcttgggtaacggttttgaagaaagaaggcctggtgtgagaggaacatgttgtgttggcatcaccacctcacataaccaaactaacactctcctatcattgttgggtgctgagagagctggtggtccctgcctgtgtctttaaagtgacaagggttgcctagcctgaagattctagcacaacatcagcatcttacctacataaactgaagattcctcaagaatgttgaagcaatagtcattatgtttactacaggagtaagtgaggcatcaatctaccttctaccttgtgagttagccacataaagcagtgccacaggttgaaacaaaccttcttggtctggtttataatttaaattctccatggaagtagctgcagcttggaagctcattccattgaaaagttcactggctttggtgattcacaaaggagcatttcttatttggtgaattagtatcctaattaattcatttcatggagcaagcatctttgtgattctctcttctgctgcctactttctccctggcaggtacaggtaggattctaaagtataaagaggactttcacctggaaaccagaaggttgagttcttaaaggggtcatgatgcttgctagtaatgtgacctcctgctattcaatacttctgagtctccttttactcatctgtaaaatggggagaaaaaaaaactgtcctgccttttacccttttcttagcatacaagagttactgagaatgcttcagaagctattatgaaccactgtagcatcagctatatttatttaaggcacctattttgtatgttaaaatattctagagtatcttataactcttggttaatgaaactaaggactttctcactccttaggtaaaaaagtagtgtttatttcagagcaagatgttcaaaagcaagactaaacaatttgattcctgggatcatgccatcgggctgtcttgactctctctgattgctttcagtatttttattttattgggtagaagaacttggtaaaatgttaccctgaggctaaagagagctctttaaaatgactttagggatctgaatagaccagttgccatttattcccttaatatgattagtttcctaatagtcaaaggctgagatagcatttatttctcctaagtttcagtctaagccaatgtgggtgcctattagtgtcatagtgatgagtggcacagatgagcaaacagataattaaggaaaaccaaatatccttcccatcccccacctcacacccatttagtagttgactttggtgtaaaagtgtcttcctgtttcagtaggataatttggtgctcatctgtcagatagatggaggatggcaatgctaatttgtttctccaggcatacttgcctcagacttaaggactaaggttaccatgtagctcagagctgaaaggtaagagtcagaggcattcaatgattaaatagtcaatatgttctgacttctctgctaatttagcaaaaggaagaacatctcaattttgtcacttattaccagttgtttagcttgtcttagaaacatgccttgatttgaatagataaactacttttaaagcataagtcagcagccttttgttttatgaaatagtagtcctccatttggggcaattaaaatgaccatttctttggaaataaaatgttaaactggtgatggtagggtgaggtctagggggtgataggagagggaagttgagatttcaacagctaagtgcaaaagaaaattttaaaatacttagtattaaaatttttaacttgctactactttattggtctcatataaggacatgaacacctggggaagtaattggaaagggaaggaacataaaaaatattttatattctgtgaggtaaaaactgaggctaaaacataaataatttggcccaggtcatatggcaggagaatattagaatctggatttgatcctgcttttgtctggctgtggctgtgaaaattgagtccatcagttttcatcccatggcatctggaatcattgccccttgccacgtctttgtgtgtgtgcgcgcgcacgtgtgtgtgtgtgtatgtgtgtgtgcgtgctccaagttcatcccgatttctttaatctagccttgttaaaacacattttaaggtcagtttttaaggcacaaaatgtaggatgagtgagttgataggtagatatctattagcttgaaattgtattcaaaacagaacctcattcttaaaagtttaaaaatctatatcaattacccagcctcaaatatagttttcttctctttcaaatgttgtagaaaaatgcttcatattttctggctactgagcttcttaatattagagtaccatctcttcctacaattcggttacaggttgctcacttttagcgacattggctttctagttggagaaattccttagatttcaggtaccacatcagaatttctttcagttagggtgacagatccaatatactacatgtgtgtgaagtatagatgaaggtaatcagatctcatgcttcagggaataaactgattacccgcgatggtcaggaaggaattttcaccattagcatcctgcaaatacacaaacccaagtgcaagaatccaactttcttctatgtaaagttttcttgtagcacctcatcaagtgcagggcataaaatctaaacctatgacataatgtgctatgtataattgttgtcatacatgcatgactgtttattatgcaccaaaataaatactgtagcagttgagacagagtctagttagataactgagatagtgattcattaaatataaactacttaaaatcttttcatgtttcctccaggaatctcaaagtaccttcccaaaatgagctcattaatcctcatgaatattctgtcacataaattctgttacatttctctgaaaacataggttagtcaatcttactaactagtaagttctagcagcaagtcttcacagcactccaacacctttattgccttgaaatctcattagagatttagtttctaacactgttaatctagatggaattctttcatccctagctcattactacatttacccttcaacaaacatgtggtgggagtcaactgtgcgcaacgtgctgaatatgaaaagttaaatggggctcagggttcactgggaaagtgctggtaagttcattcacatgcactccagtacaacttggtatgcccagtgctgcctagcctagcaagaccctctttaatctactgttgccttcttgtacaggtctttatatcatgcgggctttgacacagataaacctactgtaatccgtgatttggttctaagagcctataatgaactccagttaattcagatgccatttagagaaacttggtcatattctaccttagaaaactcttggaataactttagttcttttgaaaattgcagtggtccagacatttttactctagtataactgctgtgtgtgtgtgtgtgtgtgtgtgtgtgtgtctgttgatcagaaactttataacgaggattagacttaaatttggcaagcttttctagataaattctagagaaaggtcccatgatgatcctagaaaatttaattaagagtaacaattaagagatccttttgaagtgcccatgtttaagttttatttgtttggttttgtatttttttctaaatattctttcagatcaaaccaagtctaaactggttactatttgacttaatgaaaggcctgacatgaaggaaggatgtaaataattttgagagaaaatacttttgaaatgttaaaacatttcttttgagcaatgttatttttattataaaggaaatagcactttcacctctgggagtgaataggggcttctcaatttgatacctaaaggatatttcctctcaagacaaacaaacaaaaatgtgcttactggggctgcaccttcagcccagcattggatatgttaattgctgacatacttgaggtctcactaagagaaaaatatcattagactgctggttcccaaaatacattcccttaaatatcagtcctatggagtggtccttgggaataaaaatcagggaacatattcaatggtaaatatatatatatatatatatatatatatatatatatatatatatataatatttatatatatattatatatgtattatgtagctctttattattattattattatttttgagacagagtctggctctgttgcctaggctggagtgtagtggcatgatctcagcttactgcaacctccacctcctgaggttcaagccattctcccgcctcagcctcccgagtatctgggattacaagcacctgccatcacgcctggctaagttttgtatttttagtagaaacagggtttcaccatgttggccaggatggtctcaaattcctgccctcgagtgatctgccttcgacctcccaacatgctgggattataggtgtaagccagggtagctttttaatactgctccctctctcttaggtattcacagtgcatattagcaaattaaatgttctgtgaagtcttgtattaagtacatcttttaatattttatttaagacttcccaaattcacttgaccattcactttgtaatattccttgacagaatacttgttaatatccagctcctgggaacacaatttgggaaatactacactaggaaaaaaaatctaggttggggaaatctaactaaacaagagtgtttatttacattagtaagttactttgtactttatgtgagtctccttttcaagtgagtttctcaagtgtcttaaaatactattttaaataatttttaaaacattgatatttttttgaaaatacattaagtatgtttttagaacttgaaattgaatgaattcccccttatcccttgtctgccagttctgttagtcttctcttcagtatttgatttatgagagatcaattcatatccaacttttcagagcatgtctcatgtcatgtgaaagacagcatacctatatttgtgtaagaaaggggagaaaacctacttctgagtgtaacataaaaactatgtgacagtcaagtatgataaaaggaaaatactggttatagggtcaagcaacctttatctctttttggcttactgtgagatttgggccaacaagtaacctctctgatcctgcctggataattgaaatgactattacttccctccaccagagagtgaatgatgtgtggattaaagtctgacctttgggcaaatgcctcctagtgacttgaaagaaggtgccctcatttctaacccacaccttacatctgtgtctatgatcccattcacagactggttctgaattaattctgtcagtcttgcattcttgcacttgccttcctgtcacctattcacttgcattctctctctacagttaggacattgtcaacacagattgtgtttgagtaaaaaagttcactcagagaaaaataattatagaaaggaaaagcatagatcaggagacaagtaaagacatacagtgaatctttaatccagagttgatttactcaagccttattgaaagataatcatgaagcaaaatgattaggtatggatgtgtaaatctgtaatgaatgactctgagtaaagattgtactcatcatcactagatttctctcataagtgcattgggttaaaaaaaagaattacctaagatcatttgaaattcagtaataagattctcttcagaagatcttttgattctgtagagaattaacatatctaattattatctgaagaccccaaacaccagatcctccaaaataatgttccttctgacattttcaacttgtataaaatttggttatctggaaatttactgcacataaggtccagcaagagaataattacactttattgatattttctcacaatgccatgagaaaatctggctgaagctgtgaaaaatgagttatatttataaaccagagatgttagctttccaaagtagtttcaaatccagacacccaatacacacacttccactcaccttcacgttctcacaaacttatacaagaaagtactcaatgatgtatttctaggcattaaatatttatatggtgtatataggtaggtatatatatatatgtatgtgtatttatgtgtgtgtatatgtacatatgttcacatacatttatgtatatgtatgtatatatgaatcataatttgctgataagcgttagacactattattataaatttcccttaatacacaaatttctcaatatcttagaagaaaattttcaagtatatgagagctcttctttctatcagcataggtgatagcattaaactgaatattaaccattccccagggtagagaaattatatctcagggtagaaaaatatatattttttgtatggaggttacttcttattgaagtgtgttagatctggccaggcatgctggctcacacctataatgtcagcactttgggaggccgaggtgggaggatcacttgaactcaagagttggagaccagcctgggcaacatagtgagatgctgtctctaaaacaaaaatttttataattagccaggcatggtggcacacgcatgtagttccagcagctagggaggctgaggtgggaggatcactttaacctggggatcaaggctgcagtgaaccagattgtgccagtgcactttagcctgggtgatagagtaagaccctctctaaaaatatatatatttttaaaagtgtgttagatctgcatattataaaatgacatgaattaagattcttcctccgtcatttatttctgttaaaaaaattcactgcttgcaaacatgtacatatatataaaccactgcacactaattatactgtatggtgtcacaagggtgttttttttttttacttgtaatgttttgcctaactttagagaaagcttgaaaagttaattaaaatcaacttatgtctcaacattttgttgcagtagaggaatttggaagaagggaaaagagaatagcaatgaattgattggataagaggcagacacatgtttttaaaaaaggatcagagcttgcccagtttctatttaaagtattgtaaggacctaatagctagctatagtgatacatttaagattaaaatgagcagatttggcggtacaggggagatgatggctagctggggatattagaaacagagctataaaaattcaacacaacctggaaaaatgcaaatgaatacaaccaacagtggggtgcagggttggttgcgggggacaggtggattatcttaggtgatatgctgtggaaggcatggagtttggctgcagggctgggtggtcacctagtaagaggaatgctttggctccttcccttgtctcttggaaatcagaagagacactgggccttttctcctttactccaagaagaaatgctcttttttcatatatctttattgaatacctattatggtccatgtgttaagagatggggaagcaaagagatacaactcatccaccctaccctggagaagcttattgcaaataccgtcaaatgcagtttgaaggaaatagtatgagatttgaattaaggacactaagattttattcatggattaaaatccgtattctgtttcttaatgattttgtgatcttgcacaggtccattaacctctgagcattagttatctgtgaaatgggagtaataattgagtctgcctcatgggaacactgtgatgactaaatgtgaaggtttatgataatgctctgaaaataatcaaaagtgctaaaatgatatggtttttaattatgaggtatttttaaatccaagcttgatagtagagtcagattatatacaaagggatcagagaaatagataagtatgggaggaatgataaatataggaagaacattatatacatcacagatgagttcaggtgcatgggggtcctggacttacaagcgggtgtgcttagtttaatgctctcctatcaccaccttgaaagttttaatattttttaaacaaaaggactcacttttttaatactaggcctcacaaattatgtagttagttctggttgtagacatattgcgtgtataaatacttagattagttacatgcccacaatattaatcattaagttatttgtgtatacatttaacagttacccatctatttatctatccctatagagacatattctcccatgtaggatgtgaggcacttgaggagtgaaacttgcttgaatggatctagggcccaggagagaaggcgaacctgaaaaacagttgttcggtctaatagttatcactagttggaagtcttgtacgttccaaggtcaagcgctgtgatgtgatacattacacacacacacatataatatttatttatatcatggaataaatgtgtaaatattactatattactaatgtatcttaattttcttttttacaaagatcctataatatcagtaggtctagaattaggtcaagaatctgcatttttaaaaaggcattccagcggcttctaaggcaggtggtttctagacaaactttccaaatactgagtgaaaagtttattcatgttgtgtttccattatttatgtgtaatttggagaactgggtgatcttttctccaggagcccctagcaacagatccagagaaagaatgtcatagctagcatttctttgtgttatttgggaccaatttcaaagttactgcaagatgtttgctttgccaagagatatcccatatccagtccaggccctattggatgccaaataactattagtgtacagaagcccccacttttccatgggggaaatgatctaagacccccagtagttgcctttaactgtggatagcaccaaaccctatatatactatgttttttccatacatacatgcgtatatacatagttatgataaggtttaatttgtaaattagtcacagtaagagattaatgacaataactaataataaaatggaaaattatgacagcatgctgtaatacaaacaatgtgaatgtattatagtctccctctcaaaatattttgttgtactgtactcacttatttttggaccatggttgaacaagggtaactgaaactgcagaaagcaaagtcgtggagaagggggaactactgtacataaagaaatagtggataataacaatgagaagatagattggggcctttaattctggataaaggatctgagactcttctcagaaggcaatagggaaccactggtcatacagaattaaataaaggagaaggaaacaaaaggtaaggagatcacttagaggctattacaaaaaaagtagagaagaggtaacaaaggccaaaagtgggcactaagagtaaagattaagaaaaaatatctttaattatggaaaatgtatggagattcctcataaaactaaaaatagaactcccatatgattcagcaatcccactactgggtatatatccccagagcttgaaatcagcgtgtctaaatgatatctgcactctcatgttcattgcagcagtattcacaatagccaagataaagagtcaacctaagtgttcatcagaggataaatggatgaagagaatgtagtaatgtggtatatacacaatcgaatattattcagccttaaacaagaaagaatttctgccatttgcagcagcatggataaacatggaggacattgtgctaagttcagaaataagccagacacagaaagactaaaacagcatagtttcacttatgtggaatccaaaacaatcaaatttatagaggcagagaatagaatagtggttaccagaagtagtgggtagggggaatggagagatgttggtcaaatggtaaaaaattttagttagaaggaattgatgataagtatttaagaaaatggatatattaattagtttgagttaatcattctatactgtacagatataacatcactgtgtaccatacaaatatatatatatgcaattatagtatgcccaaaaataatctctaagtcttctttttaaattttactttcataagaatggtatccatctgattgaagaccatcttctttcttctccatatgcaaatgtattccttatagaaaaatgcactcctgcccccaccccagcaaccatgcttcaggccccaaagaagttttcctccctgttaccttgcaaaggtagcctctcttgggaatcgctcactaattcaccctggaatactcttatgttagtttcccttatggtccctaacagcctttatctgttattcatctcccaggtactcacagcttgctgaaaggctttttctaatcagcattgttttgtcttctttaaaatccttgatcatggccactagcatccttgacagtctctggacacttggtgagaaaagaataaactcaatgcacaccagtgagagatcatgcccttttcttctgacaactttgtggcatctttggctgccctttttatgtgcttgtctttgtgctcccctacatcaatctcataaaacatcctttttttcatgcttgacatattgatatcatcccaccgcagataaaacacagagcagtgtaatatggacaggtgttggaattatttgcaatgcacagaaatctctgctgatgtttaagactaggacaatattaaacacattactttccctgacaggcattttcattacacccatgccatgcaggtgcagaatctagaagtgatatcttgttttccccaatagggtctatgcaatacaatttaaaagtgtgtttgggtgtgtatgtgtgtgtgcatgtatgtgtccttccccctttatatctttatctttgcaacatccacagcctcttgtttaaatcacatctgaattcacttggaggaatgacacaaattccaaagaacctgtagttaaaatagttgctatttaccagatcagtattcttatggttggtagtgtcacatggtcaggtttagagggcaactctgagataggacaagatgaaaaatagcctaggaaagatcaagaaagaccaacatcagaaagccacatagtcctccagagtgagttactatgtagcttagtttcatcaaaaagagaatcatggccaaggtggctgtattagtctgttctcatgctgctaaaaaagacatatccaagactgggtaacttataaaggaaagaggtccagtggactcacagttccacatggctagggaggcctcacaatcatggcggaaagcaaaagagaagcaaaggcacatcttacatggcggcaggcaagagaacttgtgcaggggaactcccatttatataaccatcagatctcatgagatttattcactaccacgagaacagtatgagggaaactgcccccatgattcagttatctccacctggccccacccttcacatgtgggtattattacaattcaaggtgagatttcgatggggaaacagccaaaccatatcagtggcaaattcaaatggctacagtaatgaaaacaacaataacagcaacaaaaggtaatattacttgaggatttatcttgtaccagaaacttttacatgctttacattcatgttgaaaattaaatgctggccaggtatggtggctcacgcctgtaatcccaacactttgggaggctgaggcagacagatcacttgaggtcaggagttcaagaccagcctgggcaacatggtgaaacctcatctctactaaaaatacaaaaattatccaggcgtggtggcaggtgactataatcccagctattcgggaggctgaggcaggagaatcacttgaacccaggaggcagaggttgcagtgagcagagatcacgccactgcactccagcctgggtgacagagccagactccatctcagaaaaaaaaaaattaaatgctcaaaacaaccctatcaggtaaatcactgtaattagcacctatttatcagatgagaaaaacaagactcataaaagtcatgtaacgtgtataaggtaacacagccagtgattcaagcccaggtctatctgactacaaaacttgggctcttagctttttgggattctatactcatggagaggtaaagctcagatcctagaagatcagctggagaagttagtgtatgaagtaggcaagccagatctgaggccaagctaagggcagaaaacaggagtcctgggccactcagcatgcatgctggctcaaaggagtgtgtttctgagcctagaatcttcactgtctcctgctcctgctaaatgttagagacctctaaaataaataattgcagtagctttgtggcgtgttttaattggctaccctctgggttccattagtaggtttacttactctaccctggacctaaagctgcagtgagggttgttacctccagcgaggagagtatttatcatgccctctccagaggtaactgcaattttgcttaagtgtactaatggcatctgctctcagctctgtgtttttcctctctgggtcttctgataaggtcattaggaagtgtgaggcagacaacctgagggctaaagtctcattcagctccatcagtcagattctgctgggactgcacaacccaaggatcctgttacagcatctgcctggaagattcttaagaaggaacttgcagttcattcattacatatgttctatgctgaggcataacagtggaggctgttttacagtgtatcatgccaacagtacatctgctgctggcaattatgctactaacatacaggaccttaagaactcttccttcccatagtttcactgagaaaaacaaaatcccagaagaatattaattgacattaatatgacacaattaaccatttattcaattggcctttccacctagaagtttaagcattcatctttcctgtatttcagatgaacaaaatgagataatgcattcatatactgattcagcaaacatttattatgacttcccatgtactgggtactatatagatatgcgagattaaaacaaagaaatacaatgtaaaaattcagattcttttaaggattccaccgtctactaggggaaacagatgcaatgatgtcatctataatataattttctgtgttgtgatagaatcatacataggacagcatccaaatacagcagataagcaactggctcagctagatttgggaggaggtcaaggcttcatgggggattcaatacctgagcagggtattaactaagagtgtaacctatataaaaggaatcttttttttgagcatttactatgtgttgaactggatgcagagtgctttatgtgcgttgtcataatcctatgcgtaaaacaatccagtgaaatctgtactatagccacatgtctcatgatgatggggatacattctaagaaatgtgtccttaagtgattttgtagttatgcaaaatcatagtgtgtactcacacaaatctagacgatatagcctgttgctatatggtacagcctattgttcctaggctataaactcatacagcatgttactgtactgaatattggaggcatttgtaacacaatggtaagttttttgtgtgtctggatatatctaaacatagaaaagggatagcaaaaacatggtattgtaatcctatgggaccatgatcatatatgcagtttatcattgatggaaatgtcattatgtagtacatggctatattattatcatattataaaatttccaagtgacaaaaaaaatctgaacccctgctctcaggctccagatcccagcttttagcagatatgccacactatcattaactacggtgtttcgcttaggaacatcaccaaacaaagctacttgttcttcaaggacccagtaatcatccttatccttgcacaattatcctggctctatcgtttgatgattttctttctgcaactaatgatttgggtagaaagaaaacctgccgatagtcatctttgatattgactggtcagtcccaagatctaggcattgaagtttctaagagtctctctccagtcctctatattgttctctgcatactcctccaatgtggtactgtactatgcagataagcacatggatgtgacctgatcctcctcaatcctatgctccctgacatctaaaatgggcccagaagcaaaacactttgcctgccgatttgtgcttttcagaagatgagcattttcttttacattctggacacacacataaaaaaacttttctatcattaacctgccacagccttatggaaattctgagaagtccagttcagcctcataacgcgtgaacgttatttatcttgaatgctgcaaatttggcatattggtggggggtgacaaggttaggtagatttattagcatcctgtcaggaaatttcccatgagcggtagaggtttgtcagaaaattcagtgtaattgataggagcaagttggactaattcttagtgctagatctgtactggctctgttcacacctttcctttgcagacaacaagatgtgctgaggagagctcattaagaagaccttcctgcaaacccattctttgcaccaggtttctttttccttcctttcttttatataattatttcagttactggagaagatataagcgtatattggaggcattactgaataggcaatgatttcaactcatttgtatgtatcttttaagtctccaagggaacacttaaactctagggaataaggattaacaagaagccgatatctgttcagtgtttcgctctattttcactaaaggattagaggtttcaactgtcgagtctaaaagccatcaaggcaggatataacagtggaaggaggttagcttttgaattaggattcttgggtcccagtctcaagtctccagcctgcgagttctttggccctgggacagttatttaaacttgctgagctttggtttcctcctttgaaaggtgaggttaatgatgcccatctcacagggttcctaataaatattaaatgaaatgaaaaatgtcacagctacttgacctaagcatctttcaatctctagttccagcactgctgcccctgaacagccttccttgatgtggccaagtaataacagccaccatttattgtgactttatgatgttgccacactctatgcaccatgctttgcatacttcatgtcattgactcctcagaatccagagagacagggagagaccatgggaagagaaagggagagaccatgggaagagaaggagagagagaagagaggagtagggagagagagagaagacagaggaaaggaaaaagaagagagagaaaaaagcgagatgagagagaagaaagaatgaatgagttctcatgtaattatggtcaagatattcatctttcctaagcctcagtttccttatcagtaaaacagtaaattatcacgtcttaactattttgatgactaaacgaggtgatttctgttacatgcaacccacagtgcctggaacataataaatccctaataaatagaataaaatattgttgtttctgatgataagtttcatttttgttgcaagcactcctggcacacattgcattatagattccatccactgattttccgttgtttatttcaatttcttcctcctctactagtctgcaaggaggccagagtcctttttaaaaaataatcactgcgatactgttcatcacacagaaacacacataaattgtttttaaaggaagaaaaaagggaaagaggaaggagtacaggcgcgtgtttggtaaggtgtcaagggtcataggtccttagattctactcaggtttttcttcataaagatgccatttctattggaaagtgatggctctgcctctgaaaacatttcacaaaaaccagaagaggaaaacaaaccaaaaagaaatattgctggaacactatagtgtgggcacttcaatgtagttttcctattccttatatttttccatagttggaattgacactgtaagggacacttttcacaaagtagcatattcccatggctggaacaaaataaccaactttgcaaagggagttgaattacttccattccttgttaggctaaaagccatttggcctagccagggataattttggcctggaaagctcagatttctaatctagcctgactgacctattcccagttccaagattttccacatactttcttccctcactcatggagcgattacatggagttaaatacaatacccttagtggaattgtttggtacaaattgtggtggcattgactctgtccgaggttctgcttacattctgtatgcctggatgctagccgatcctctccatccagtggaatccagccttgtctttatctagcataaacctcacccttcccttgtgatctccaaacatgtgaacagcctttttttaacacacacacacacttctctctcttctcacatcatggccttctttaaatgtcaggtgttttgaaagaagttagaggcctttagaaagtgcaagatacaagttaactctgtttaaagtttaatggcaaaaatcagaataaagcaaaactggatcaggtttacagatgatgagttttgttttccctgcaacaaggttaaaaactttttgagacaacattttaaaattgaatagtgtagataaaaatgagctgtccatgaaaattattagctactcttggcaaatcagaagacattgcaatactagacttgcattcccatgtagcaaaaaatttgctagtgattattagtgattgttttggacattctttgggtatttacagtccccaccattgcctatcatcccactaacaccaaagccaactgccagttctagtaataacaaccaaatatgaaaatgcttgagcaccagaatttgtaaacccagcccatgaatttgcattacctgcttgacctctggggtcgttggttttgcaaaccatactgtaaaggaaagaaaaaggaaaaaccaagttagatgtgttacataatactatttcattatattatctcttttttctcccttctacacttttcatttaccaccactccccaccccctgctacctaaatatctttatcccaatggaagatgcgttaccaaagattcacagtttatggaccagaagaaaaatgtggcttctaagtaagtcctgcagtcttatttctcacttctgtcattgacagccactaaatcaagaagaggttaagtgaaaattagcaaaatatgcattgccatactaacaggcagtaatagaacaatctgttcatgtccccacttcacaagtccactttcccaaaactaatcaaactcttccatctgtggaacttgccacagcaggtctttttcagcaaagaaagagcaacaagtttccctgcacatattttccctggcagaaatttatcaccttatttttctacatttcaaaaataaatattttccccttatacctttcccaatcttattttaaaatggaaacagccaaaagctaggtagttgtcttattctcttttattttcattgaaatcatttcctagactgtatacatacacattatgtatgtaatttatgaagttttgtttatatgagaaagcttcttttattttttaacatgcatttatgttgctttttgggctaatgtccttaaccttttcaaaacccaggagtttttccacctctattcttctgcatcacaagaccttacattgtgtgtgtttactggccttcataaaaaaattaaaaaaaaaacactctaaattcacatttcaccacttgttatctatcaccctctctcatagcttgtgatgtttacaaatgcttctgaagtattcagtccctagagtgagctttctttgactggtgggcaccagtacgatcatagttcacagcagccttgaactcctgggctcaagtgatcattttgccttagcttccaagtagctcagactacaggcgtgaaccgccatgttcagttgaagtccacatatgataacatttctgcctccacttaaaaccctccagacagcccttcaatgacctcggcttacaatacaaatgtgttatgattttccaggcccttcttcatctgctctcccttccttttgagcattatcccatttcatgcccccacacagattctagccataccccatgacttacaatttcccacaaagaatgcactgtggctccactccaggactttgcccatgctgggtccccttcctgaaatgccttctagctgttctctcttccctgtttgctgccatttccgtggacagactatacttgtctttctgttctaattgctctgaaatatacctctggccccccagctttcctgctcccccatcccctgtagtccttctagttttcctgtgtccccatgggacttctttatcctttttgaagcacctatcacactgagccataactgcatacctttctggatgtctctttcagtggaccatagttgcacactctcttcaggaagtgcaacttgtttgtcagtgagtcgccaatgccttatactgtaaccaaaatgcagattcagtcacttgccacctgccgagtccaattcacaagagcaagttctagtataaagaaagtgactttttattccaaagctagcttaagggaagaagtataggcttcctgccttaagagtactgcttacttttggagcagaaagcaggcacttttaaaaggcatcttggcatgaatggctcacaggggagggaaatgcaggtggggtcatgtaactcactgcagtgcctaatctactgcgtggttgagctggtgacagctggtgccttcatgggcagaactaggttgtaaacgtggccaaaactctcctggtgggagacagttttgtagcaggcacttcaggttgtacattgactgttgtctctcgaggtgatctcctggtgagagggagttctgctctggagcttctaagcacatagttagatgaacttgccctgtagggagtgtctggaaaaaggaaggtaaaaggttataattgcatgtctaaagagctaagtaggaagtagggaaaaaagaaaagagaaaaaatacattatctcttataaaaatgggggtactcattacaaaactgtgtctggcacatgaatgttcagtgatgttgactgaccaaggagagttacaaaacaaaaacttggaagtgggaggggcatagcaatcagggtcccaaaggaaagaaggcatacacaaaatggttacatgaagagaaactaatgaagggatttatttcccaggtaagaaaattagcaagtgctggtgaaacacttagggatgagaaaatgtgaaaagtctcaattgtccctaggtttgaatggccacagaagacaattggattccatgaacatggctggtgttgcaaccttgtgagagaggcaactcggttatcactttggtcctaaataaaataacccagctactggcacattcataacacatcagggagggttctggaaggaagaatgaataaatgcccaatgtttctcttattgagctctccactgccaaaatatacaagaagccagaggaaaaagacagtcttatgatgtgatctatacagcttatagcagtcagcctttctagtgggcagagaaggaaaggaagtgaatctgggatgaaagtgagaatatctaacccagtgtacctgcctagcagcagaggggaatctttgactataaaaatgtttcgttgttaaattttgaaataataaatgactataagcttttcataaagtatatacctgtattattaatgttcttatgctaacatatctggttattaaaaaatggtgcttatgcactaataaccaatcagtatacagagagctgtcaagtcactcatctgtaagtgctaccagctggggttaataagcagaactgtgacatgtgaatatttccttcatgcaaacataaacagaaatttgttttattttaaaagatagaggaattctaaatatatagtaaaaatagtaagtgtgtattccagaaaatcttagcaaaaagtcagaactaagtaaatgaataataaatgagtgaatgaggtaatataattggactacagagactaggcaatgtgaaggagagaaatatgatgtaggctttgggaacatgaaaggtagagtttgcttacactgaaagaaaagatagagaaaatgtgaacaatgtgacaaggatggatgttattaaattttcatcctaaattgtaagattcttgtcctcagagaaggaaagagggaggaaaactagtatttattgagtctctatgatatgctgagagcttttacaaacctttgcttgtttaattctcacaagtcactatgagtattattatctcatttttacagtaaggaagccaagacacaaagcagttaaagaactcactggttagtggtaaaaaccaggaaataatcccagattcatctctcagaagcccattccctgtttgcataccatgcaacattcaagaatctagtgaaggaaataacacacctatcaataattatatatccaagacagaatgtaaaaatactatgccagaagtagacagtgccttggtaacacacaggacagagaaactctaatcaggaattctgatccaatttcatgcagtggtggcatttaaataagtctttgagagatttttgaaatttgaatatctgatagacaacatgacttaaaagaaagaatcattttatttatttttgacaccttggtacttgacacaatgtccatcaaatagtaagtttcagtaactcaatcaaaaataaaaatgggaaaaatgacatcaggtgtgttcagggaaatggtgatttgttaaaggtctggtagtgagtatgagggatgggttagagtgaaggctacagctgacatgataggacagggctagtttgtagaggattttgaatactattatgcagagttagaactttccataggtgtgaaataagtagccactgaaggattttgtgcaaagcagtgaaattatgtgggctgcacattaggaagatttctccggggaaatgtagcaggccctattcgagaacagtgttggcagctaagaactgcattagtatgccattgtattcattcaaagaggtactagggaatgaacagcactctgagaatgggaaacaggggccgagctgaatgatgctgtggagatagtcatttctctagtttagatagggagagggaagggcgtctttcaagaaatgacttcagaattttgagcctgaataaatggaaaaattatgatgtcattaactacagtatacaacgtacaataagtaggggtaaaatgaggagtgaaaagtaataaggaaaatgatgagtttggatcatctgtagaaagaggtccagtaggtggttatggttcggattattggatgacatcacagatatagatctggggttcctccacttagaggaagtagctgaatccatgggaggattcacaggtggtgaacaataccattgaggatagagctcagacctgggagagcacatttttaagtgacgggtgataggagaaaaactaatgggatatttgaaaatgagaaattgtcaggttcattgcactattacccccatttttctctcttttattctctcttttctttttgtttcttttcttttcttttttttttcagggtcttgctctgtcacccaggctagaatgcagtggcatgatcatggctcactgcagccttgatctcctgagctcaagcaattctctcacttgagcttcacaagtagctgggactgcaggcacaccatgcccagccaattttttattttttgtagaaataaggtcttcctatcttccccaggttacatttttctctttctgatagtacctttatctagaacactaagtagctaatcctttctacaaaattaaagatagttactttagttgacagttaaatatcctattgtacttaaagttcttgtacattccgacgggttaatcagatgcctccaattccacctctttcaagggtggtgtatctgaatgtcaaggtgattggcataacactaatgcataataaccagaaatcgagtttatcttccaagatcttaatagaggatcctcctcaagagaaaacctttcagacatatcagccttacaactggaatctatttacttttcatttgtttttcaccctatttatgtcattttcctttttaattgccagggatatttatatggaaaagagttttcctcttcttatttctgtcagatcttgtagttgacatcttgtttcattctgtcatgccaatgattaaagctcagtaaaatgtccattttgcatatatggctttctaaagatccatttggaggagatcagatgttaaaagagaggatgtttgttgggggggtggtggtgggaggtgggtagggatagtactttagaaactgtttcagatctaagagggaattaacaggatttcagagggtgcgagaaaagtgggataatgttaagtattacattgaaagcagcgaatgagacctttccaaagtgatgacaaatacaacagaggagtgagggctggggcagtcagcaacacaatttttccactcacttgtggagctagaacataccttccctctgttttgtaaagatgagcctcctccctttcttagaacatttggagaacttcataactttcaatataacattcaagacatacttcaagagttgcccagccacatccattagtctaggtggcacctatgtggttcagtcacatctgtatgaagacttgaagactcccaaggaacttacatcagaaggagagaaaatggggttcttcatggaaacttgccatggatgaaggtacaacatgacccattgactagaccaagtagcgtgacctggatgttgagggaaggaggtggttccaggtcaagtttgaaactggttctgaacattcctagatctgttctcctgccttgtctgtgtgttttggggaagagattgtttgcaaaagaaagaatcctgtcacttgtgtctttactgttcttctgtgggaaagggctctgaaaggattgcgttttgacaggaggaaggtgttgaaccactactcgtagatagacagggaaccctgtgcggccatagtttaggtatggttgccagttctgtggggaatacagtaaaagctttcaaggacaatgacatacgtggcctccagagcatgaggctagaaatctgacatatgcgagaaggtcctctctcacccaaaaacttttacagaaaataactagggagggacatcctagagggcaaaattagacttcttgctaaccaagtgtattagtttcttcttatattgctactcttattcttcttatactacctgaaacagggtaatttatgaagaaaagaggtttaattgactcacagttccacatgtctggggagacctcaggaaacttacaatcatgatggaaggtgaaggagaagcaagcacattttcacaaggcggcaggaaaagaaagagcgaggcaggagctgccaaacacttttaaagccatcagctcttgtgatgaactcactcactatcatgagaacagcatgggggaaaccacccccacaatctaatcacctcccaccagatccctccaacatgtggaaattacaatttgagatgagatttgggtgggaacacagagccaaacgatatcatcaagcaagtgggtgcccaaaacattgaggcaaattgtggagtttctttaagtagaatacatttgtaagttcatagtttcagcttatgaactagctcttatttgatcagcatgagagcatctaaaagagaaataataaaacaaatggatccatctctcattatttccattccatggtctaacttatttttttcttgactacccttcttcctataagaagaagaagagaaaggtctgagaaaaatatgtgcccccataacactctggggcaacctgaaggccatcttccaaaagtcccctctgcctttctcagagaagagattgttaggctgatccatgcttctgtaacacacagtccacaagaatgcatggcatgcagtgacaaaccaagaatattctgataatctcagttgaatctaagcattctatggcagaaactcgcttttagtaatctgctatctgttaaagaaagaacaatttggtctcaagcagtggggaagatcagctcatttacaagactgtcacttaatgaagctccttggtgacttttctgtgatgaatttagacattgaaaagaaatatttcacctcttcactctgctccataggctcaagcagaaaaaatgggagacattgtatttctagtttctttcatccaaagctttgctcacttatgttgacattgtgctgaacagctgacgaacatgcgggcaggccaaggaggatgctgtcttactgttggactcttctctgggcaaagttcattattgtgctggcctcagaccactttagctgccatcagttgagaggaaaagaaagaactgcattaaaaagaatgtcttgcattacaggctttagaggggaaactagtgaaaaaactgctgatgctttgggaggcaatttcttccctccctgcctgcctccctccctccctcccttccttctttccttctttccttctttccttcctttctccctttctcccttcctccctccaactcttcctccctcccttcctttcttccctcctttctagtagatgtctctgattctacctcttttttcaattgatttatgtgcttttgcttggcaagtttgcgctaactcccataattgcttggaagggcggtgttgatttaagccttgtttcattgaaggagaatagcattccttctttcataacagaccaattaaagacgacacaatgacttcttctttctgtaagctttccttgattccctgagccaattttgaaattaaactcttcttcagtcctcctaaactcattgcacagaaacaatcacaaactcacactgtcaggagtggcccaggccatctggttccactgtttgcaagcctccatagtgccgtcatagaggcatttccacagtattctagagacactgtaaaccttctccataataggccagattttcctagcagggactaatactagctgatgatagctaataggtactgattgcttaccctgcctggtgttttacagatagtgtttaaatggcagtatagggttaagagtatgacaaccagagccagagatattgggttccaatcctaccatttaatccctgtgtgaccttgggcaagatgttttacctttctaaaccacagttttcttctttgtaaaatgggaaaaaatttagctactgcaagttgttgcattaaatgagataatttaaagtagaatgtgaatcgtaatacccagaatgttctaaaaattaatgttaattatcatccttattatccattgcttatctccaaatgctttagtgtaattttcaacatggtgctacatagcgaggattatgccctctgaaattgtcacacatcaagactggtggctgaaggccagcaaaatggtaattgtgatcattatctagcacattttcttctctagaagatggattttaagtctctgctcataagctgattggtagtgctgccttagattggtatcttctgttttggggaaagaaggtgattttgccagatttcctcagttttgatcattgggaatatacaataatggaaatttgccatgggaggctgggaacccataactaaacagtccatgataatcctatatccaactcttggaaaagggaaaaacaacacttcatctcaggattgcttcagggtgaatactgtgcctactacccatattaaatgcatttctttatgtccatccctcctctctctctctgtctctctccctctctgtgtgtctttctctctctctctgtctgtctgtctctctgtctctctctctgtctctctctctctctctctcacacacacacacaccccccagaagagcattttggccacttaaaggaatgctgtgaggaattacagattttgactgcgtaaaatattgtgcgttgttccaagcaaaggtaaaattctcaaactgttgaaattgtttttatcagcactactcctaatcataattactgttgtcattagtcagtgttgggtaccactaccttctgtgataacacttaacacattgttagcaattacacagaacttcccaattctgccagctccatgctacatcatcaataccatttcctgtagtagagtgccccctagcacctccacgcttctctcagtttaatttgctttttgagccccccaaagagagactactaaatatcaaaggcagctttcactctttagggacttgggctttccaagtggttaagtgcccagcattaatctcctgagatttgttcatctgacttcacagcagctggaacagggacagagatcttttggacagcctgttctgccagaagcagagcaggtggctttctctcgggtcacaattgaatttaaaaatcccattaattttgtcaagtcaacttaattctcttaacctgataattatcttcctttggaaaaagaacaataaaagagtaggcagacctctgttaagcaatgtttaaagtgtgtgtgtgtgtatgtgtgtctgtgtgcacatgtgtgtgtgcatgcatacatgtgtgtgacagaaagagacagaaagaaaggctgcctgactgattataggtttataaggttcacttcttagttcatctctgaaaacaagagattttggctgctgtcttatttgtccttaaataatttgggtgatccacctgggcattaggtcacagccttgggccctctttttaaagcacttgcatgcctgggaagaaggtggtaggctcttacagcagcaaataagagtgtattgcttaaacctctctttgaaggcagggagggcgagggggaggtgtgagatattttaaaaataagatgtgctgctaaattctctgccaacctccgttcatgctgagtggagtgtaagtaacaagtatcagatagttcctccagatgtcagctatttaaagagtcacatgctagaagttctgtggatagcaattgtcttattcctggtggtggtggtggtggtggtggtggtggtggtggtggtggtgatggtggtggtggtggtggtggtggtgatggtggtgatggtggtggtggtggtggtagtgatggtggtggtggtggtggtggtgatggtggtgatggtggtgatggtggtggtggtggtggtagtgatggtggtggtggtggtggtgatggtggtggtggtggtggtggtgatggtggtggtggtggtggtgatggtaatgatggtggtggtggtggtggtggtggtgacgatggtattaggaggtggatgctgcctcgcagaaacttttatcagcaagaaagtgtgggaatgtgtttgtgcatttgagaagtaagacaaattagaccagagggaaaaaaatgacctaataactcaggaagatcatgatatcaacctttgtacaagtaacatttgatttttaaatgtataaagcaagaagaatgtccaggaactctcaattcctgtaaaattattgtattttccttaagaaattaacttataggccgagaaattatacaataaggaaaatgattcttattcaattttaaacttttctctactgctttacctaaaatagactggaaaaaaaaaagttgtgactgttctcttttgttatctctttgaatcccagtggtaaaggacttcttcctacaagacataatgaattgatctgtttaagttagtaatcactgtgaggaagtggtagggtcaagactgattagagtcttcagaatttccccaccagttcaaatgatgttttcttacactcatgcttaaaagttctgcataagggtcacaaaaattgttaagcttcatttcttctcttctcttctttatttaatttttggagacagagtcttgctctgtcacccaggctgggatgcaatggtgtgatctcagctcactgttacctccgcctcccaggttcaagtgattctcgattctggtgcctcagcctcccaagcacctgggattacaggtgcgcaccaccacacctggctaatttttttgtttttggtagagaccaggttttaccatgttttccaggctggtctcgaactcctgccctcaagttatctgcccatctcggcctcccaaagtgttgagattacaggcatgagccaccacacctggcccattccttatatatttttaaaaataacctgttcttcttcagtttctacaaattctggctttattcttttgcttaatttgaatttcagctgtgttaataaccagagggactccaaaggatgtagttttataatttctctgagggtcagttcttccagttttatatggaagagaaataagatagctcccagctcttggctcattgttggtgacaaactcaagtaacaaacactgcctttctaatgggagatatcattatgctcaattcctcctagtgtctcttctaaaacagatactcagataaaacacttatctctgggagaaacagataggcagagaaaagaagggtatgtgattaagtgaaggtagcatttctagaactgaaactttgtcttttccttcaacttccatggcccttttgagtaatagaacaaagtagagataggtttggttgtgtcaaacacagtgggatcagatgtccttcaaacagactttgagagacagtgtggtcatgggttttattttttttcctcactttttcttttctggaatcttctgcaggcatcccaggttgagacacttgcaaaaaaaagataagaggcagctatacaggggagaatcgcaacctgtgtagtcaccatgtgaccacttgtaaaacagtcccagcatcccatcttagtttgtcccttggtagggcaaggaaggttgtgagcttttgttcgtgatgttaaataaagaacattgtgtgtcaaaagaagtagacttccttatctgctgtttacagctatgaaagaggaggtgttggtctttcttctaagctctatcttccagcttttttttcctaccttctgtttcacatgatctcatacagaaaacttctgactttccaatgtagggcttgttctgttgtcagcatttgtagtcagcatttctctagtgtttttctaaaacccttatctgcagggaacgtcaacgtggttgtagcatcaatagaataaggttttagttatatatatatgtatctacatatatatagttatctatatatatagctgtatatatagttatctatatatagctatatatagagttatatatatatagctatatatatggttatctatatagctatatatatagttatctatatatagctatatagttatctatagatagctatatatatagtttatatatatagttttatacacacacacacacacacacacacacacacacacatatacacacacacttagcttttctgtttcaactttgagtcataatgttgaatgaaaactgagtccaagattgatattctggggtcatctacatggagcactgaactatcttcagtgcattacatgggaaggttagatattggtaagaaagttaggaaatcaatctaatttctcctattctgtctcccccacctttccttttaccgtccattgtgtgcagaattcaagagtgccattcactcagttgtgccagagcataattgctgataaagtagagctgatgaatttgcactatggaatgatcctggtcatatgttttcctgaaattttctcaagttttgcaaatttattttctatttcatacttgtctaatatttttgatatgtacaaatatgtatctaccttattactttagtgagatgggactcatgttctctcatacacaaatacatatatcttatgtatttaaaacatatccatatctataaattatattttataagactcacatatccatatctataaattctattttataagactctagctaaaactgagtagtgttttaagaattgttaaaaaggcagacacgtcttgggatgctagcaggtgggaagtatgatctgtccttaataaaacatgattaatctcacaaaaaaggaaaaactctcccatttaaggcccagagaactaggctaaaccagaaaacagagaggcttgtgttggggagtacttttgacagatccctcacccccatccgcacagccacccacaacataggtgtatattgtctctgtatgatttcgtatctggtgctgttctgcacttctcagtttgggggctgaattcctcagcatccttgccacattacagaaatagaaagcccaatatcatagtcacaccaccaccccacttgccacccacaatgtaacagaagagcaggcagccctcagtttccgaaagggttgtattctcaatgttactttataaattctcagagctcagattatattttccagagaaatggtatattctctttccagaactcaaacacctactaacccagaatattcccaatgtcctagtcaagagatactatagtcaagtacctggccacataggaaatgctttctaaaagggtatgtatttggaattttaggttaggataccaatgacatatttttcaccattacagatttgataacaagatctgggctacccaaacacctacttgctgtctgcaaagatcctaggctagttagttctttatccaggttcatggcaaagtttgagaggagattcaaaggtaagaaaggggctccagctggaaaaggacatggtgaggtgctggacttgatgtgctgggaaggggtgaggaggagggtgagatatatgtgaggggcataatgggagcagtgggaattgggagacacagggagaagaaacgaaagctgaaggagtggactttgagggttaacaaagaagagaagcagaacataattcaattcaattcaacatactttgttgatcacccaatctggtatgtgccagaaaagtgagcaaagttgaatgagatgtgttctccacaggcgagatctcctgtaagggaaggagaaagggacatatgcagatttgcattcttggagcagatctgttcggttccagactagagatgcagaaagggcacagagaaggagagatttatcctgacttgaagatgaggggacgtctcatggaagaggaggcagttaagctagacctgaggatgctaagtgcctcacataagtagggaaagaaagcataagtccagtctgggaaaatggtgagtgagatgaaatcccacagataagaaaggtgctgtgtgtgtgtgtgtgtgtgtgtgtgtgtgtgtgtgtgtgtgatggggtgggggcggggggatgacaacatgcctacagaatacagggggatgtgaaagaacaatttaccttccagaataaacttccttctttagcactatgcacatattatcttggcctctaatgagactgcaatcctgcgggcaagttgtggttctcatgggatagaagaagtgaggatgggagagggtaccgaggaggggctctgggactttgagaatttggcagtttggggctagtgggcaaggagatttttcccacttcttgcttctctagatcaactactacctggcctattgtatgactctcagatgctaatgtggtgggagtaaagaaggaagcatgtccttggagcccagattatatttcagggtatccaaggcatcagagaagggaaacacaggggaaggaaatttttagaggaaatgtggaggcttggaatgctccacatttatacaatgtttacacactcaacattgtataaaaccagtatgaaagacaggattagtctgaatttcatgaaacattctcttgggcccctcctgcccacaacttcttttaaaaggaaaaatgaagtgcccaatcctcacatttcttcccatgcaagtgaacccctgaagaatggatgctgaggttggggctgctctctgatcagcaaattctgagatactagaaaaaaagaaggaggaagaggaagagaagcatgaggaagaaaaagaaggataagaggaagaaaaagagggagaaggaagaagaaaggaggaggaggaagaaggaaaaggagaagaggaaggaggaggagaaagaggaggaggaaggaggaaggagaaaggaggaggagaaggaggagaatgaggaaggagaaaggaggaggaggaaagaggatgaggaaagagaaaggaaggagagaggaggaggaggaggaagaagaagaagaataacaagaaggagaagaagaatcatttttccaaatatttgtcaaaagcataatgcttctattaaaatgttgaagtgcatatttatgtttcaggaatttggggagaggacaaatgtgtacaaggaggcagtcactcctgtaagtgctgcacacatacagggccttcaaagcaaagagagagttctgcatttcagggaaggcaaatggctatggacattcacagaaacctggagaaagtggatggctcctgggtggatagcaacactgataggtacaaagcgaagaaggaggtgggtagctttcggactctactttatcatcttttagggcctgtgtatctgactactgctgggattgaatctgctggatgtctacagctggaggttaggggatttcacacttaaagtatgggtgtgtgcatgcatgctgtctgtggcctgtttgtttgacctcagtcttaatgatgaactaccaggaaaatggaatttgaggcactcactacctcttggccattcctcaagtgaaaggacacaaagactttatattaagatttatagcaacttcaaagctataattttgggtcttgaacacatcctttaatggaattcttttgttaaccacacatatagaaatctccatgttttcagccacagaataccacatctatataacagactaggcaaatattggcatatttcttttaaaagattaccaatcttaccatttaaatgaatatgctgaaatttaagtattatgttcatatctttacactttgaaaaacaggaagacatccctctgccctagctcaggagctcaggtgaaatgataaaatccggggaaaacatgttttggtactttggtaaatgtgtgtgtgtttatctcattcattagtaaccagagacaagcaggaacatgttaaccatcaaatcaggaggtgggagatcctggatctgatttttacttgtttctatccatttttgagcactatgcctttctaggatttgaatttctcctctgtaaaatgagggaggtaataaatggctcttaatgaaaggtaataaatagtaataaatgaagtaataaatggttcttcaacatttctgggtcacgaagttctttaaaaatataaagaaatctttggactttttttccagaaaaaaaatgcatacccaaagtaaattgaatatagttttggaaaggagtttttatcttatcctaccatagatattatgtactacacaactccgggggcacaattcacagactgtggtgtaaatgacaccaccttggaggtgggcaaagaggtgactctctttatagcagtaccttgaactccaagctaagaactcttttgccagatgagctttaagattctctctggatctgaatttcttcaattccagaaatgtcattattattaccaacaaccctatactaatctggttaggccatctttacaaaatactacagaatgtgtagcttaaacaacagaaatgtatttattttattttttatttttatttttttgagacagggtcttgctctgttgcccaggctagagtgcagtggtgactcacatggctcactgcaacttccgcctcccaggttcaagcgcttctcccacctcagcctcccaggtagctggggttacagaagcccaccaccatgcctggctaatttttgcatttttagtagagacagggtttcaccatgttggccaagctggtctcaaactcctgacctcaagtgatctgcctgccttggcctcccagagtgctgggattataggcatgagccatcatgtccggccaacaataggaattcattttctcacagttttagaggctggaagtccaagcttaaggtgtcacaaagttaggtttcttctgagatctcctctctccttggcttgcaaatggctgccttctctgtgtgtttacatgatgtgtgtgtgtgtgtgtgtgtgtgtgtgtgtgtgtgcgcgcgtgcatgtatgtccccaaactccgagtgtttctttgccttcttataaggacaccagtatattagattagtgcctcacccttatgacctcacttaaccttaattacctctttcaaggctgtatctccaaattcaatataggaattttaagagaacacaattcagtctgtaacaaatcccaaactgataaacacattgcagagagtaactagaaaaatcaaaacatctttcagatcccttctacatgcaaataagtctatcaaaaattagaatgaagtatgctacttttcaaaatgggaatttatgataaataaccagaatttatctgctactatgcttactaaaggggaaactgttacagaggtttatttagtattacatatacacgcatgtatatatctagtatatatgtgtgtgtatatatacatttatttaaaaactaacttgatgttgtataaaataaattaacttttaaattaactggccaaatgtcgtatatagtaggacaaagaatgagttaagatggaaaaaattttaataacctataaacattcttagtttttgtttttctttgggtcctccaagtgatcatcttcgtgtaacataaatcaaacaaccaaaaatctcttccacatctggtaagtgagggtaggaggaatgggggttgctcttttttttttttttttttttttttaaattttcctgatttttctttaactataatggaggatcaggggctgagaagaaaaggccaagagtttcttgtcatttttatttatgtatttattatttctcccccagtgccacatatagtaaccaccaccttctgagtaattcccgaagcaacaaccattctacaccccacccccagttaccctagtgccaatggtagctaaagaagagaaatgttcaagaagaagatttacatattgctggatgttcttattcttaaagcctcaccacgattctatggctgtatagtccattcagcaatgagtcaagcctgtgagttagcagtgttacagactcaccaagaatgtatggcaccacccaatagcatactgtcctttcatccttttttgctttgcatgtactgacctttttctctattcatcttctgtacaccgacaaggtatacattttaggaaattacatctatcaggcacaatgactccctctgtgatgtttcactcccacgcaacactcccttggatgaaatggcttgctctctgcctgaattgggctaagatatatgcctgctgagggcttctgccctcccatctctcttctaccacccctgccttgtgaattatcttctttattcctagggaatctacagtaaatactttgtcatctatagtcatttgcttgaaattaacaggtgggtggttggccaagcaaggcaggagagacgtgggacaggaaaaataaatagtaggcacaagcataccagcaggtgttattattccaaagctgtgtagctctttagcccctgtttctattataaaaattaaaatttttaaaaggcacctgggaatctataggagagagtcagtggttaagtgagttgcctgatatctggcaattaatgtttgagccagggactaaaatccagatatttttgattcctaaagtgtgattaaaatatgtctcaaccatgacatattaaactattggaaatcatacgtaatacagtcctttctatattacttcaaaacctggtttaaagaaacaaaagtatgatttttttcatgacttttcaaaagccttctgattttctccagctataaaggttatatatatatataacctttagagccaaatatatatgctttctcttctttctcttaaaggtaagctttatgctcattattgggactgatgttattgatcatatcagacttctcttttggaataatgtttccaggattttcactttgagaggatcaaaacccaaaaaacatcagatgcatttttctggcatttagttcccaggttgggcagtacattttcaaagtataattgattttgtcaaggtcttgagtttgggagtgaagactggagtatcaggaaatgtacatctctagccatcaactagtaacaagaatggcgtaaatgttctagggactcactctgacatccaaagggaagggagcaacttctgagattaagagacctttggttttgtgatgggaacacaaaaagtaaacctatttgtccatatctcctaagactccaacaaattatatgaacaactgcaagttatctgaatatggaatgaattatggatcatcaactaatttaatgtaaccccaggttgcaattcccgtttttagagaggtaacacaaaatatttttaatctctaaattgtaaattgctcaagcaccatgtaataaatatcaatatctaacacaaatgttttggtcatcacttaactatcatatatataattgaaagttgactgtaagtattgcacaggagggcacaaaagatatgtaaactaattattatccagtagtccacactgactatcatttgtatgtcatttgttttattttattgcaaagtaggcatgttgacacgtgtgttgggtgacctgttataaacatatagaaaaacaaaaggagagaaagagagataataatttgatcacagttctctttctaaaagcattgctttaatattctcttatatacaggtagtgataattaaggatatagaattattttctaaacacgcataaatttatagttaagagaaagcatctcatttcaatgataaaatgagagatcatttaattttttttttttttttgagacagagtctctctctatttcccaggctggagtgtagtggtgcaatcttggctcactgcaacctgcacctcccaggctcaaccgttctcatgcctcagcttccctagtagctgggattacaagcatgcaccaccacacccagctaagttttgtatttttagtagagagggggtttcaccatgttggccaggctggtcttgaactcctggcctcaagtgatccccctgacttggcctcccaaactgctaggtgagctaccacacccagctaagttttgtatttttagtagagagggggtttcaccatgttggccaggctggtcttgaactcctggcctcaagtgattccccctgacttggcctcccaaactgctgggtgagctaccacacccagctgagatcatttaatttttgatcacaactattgggagtattttaaaattgtaattgacgtagactggtatgacattggggactgatgatatggaatgttattgctgattcttcagtatgtggacttcttgcattatgttccatatattcttaaaagaatggggctctcatataattttatttcagatatgtccattatttctggactgttagttatgccatttaaattaggtatagccttgctacctttttccagcttatcagttttaagaaagatatggtaaatttattcaactaatggtaaacactttttctaaacattgttctaggttctgaagaatcgacagtgattgaagaaacaaaaacatttactcccatggaacatacattttagtgggttttttaaatcacagatttgtcattttttttagtcagtgtgtgctttatatattttgaggttatgttattaggtgatacagatcaggactgttacagctgatctagttaattgtttttcttcaggatataacgatgtttttagatgtaaagtctattttgtctggcaataatatttccgtatctgttttcttttggttaacatgtttcaagcatattagttagaatatttgtttgacagtatggtagttctgcttctctaggtcacctccagatccaggttgcctttttcttgttgctcagccacagcacattgggcaacctatcagttcagcaaatgttaaccagaagaaaacatgtggtaatgtccacatgggcaaagttggctcatcacctcatccacattccagaaaaggggcaaagagaaagcagaaagaaaacgtcagcctcttaaggtatgacttagaacttgcacacataaattgcataggatttagcaacagaatagtaatgccatttagaccgtagacacagtagataggtggtttgggttcaaatactggctctggcacctcctggctgtgtgagtatagacaagttacaatctatgcctcattttctccaattgtaaaacagagatacttataataatatatatcttatacacattaatcaagtattggttattattattacctttatttttcttctgcagtttctagaatgcctttgtttaatcacttcaaccatatttattttggcaatgtatttcagattgttctattacgtcacattatttgatcccttgttctaccattgttgtggttattaactctctctcatggtggactattttcttactaaatttttatttttcttattttattttattttattttttgagacggagtctcgctctgtcgccaaggctggagtgcagtggcacaatctcggctcactgcaagctccgcctcccgggttcacgccattctcctgcctcagcctcccaagtagctgggacttcaggtgcccgccaccacgcccggctaattttttgtattttcagtagagacggggtttcaccatgttagccaggattgtctcgatctcctgaccttgtgatccacccaccttggcctcccaaagtgctgggattacaggagtgagccaccgcatccggccctatttttcttattttgtactgaagtttatgatactgtaggagctatgcatgcctcactctagaagaaaattccagctattctgacattaatatagcatatgatactaaacaagtcactctcttctgtatctgagtttatcctaggtatctcctgaatagctaacatccttctttttcttaccggcgactgaggagagatggccttgtgttggttagacagagcaaagtagttctgcagtctgtcccacggttctcaggctacacgtctttatttagggtgattcatttttatttatgtttagcccaccatagttccatgctgaagaggtaaggaacaatagggtaagcaagccagccagcatattcttcccataccgatgagcttttcaccagaggaaaatgccctctcagatcacagaaacagtagctgtgtaggtgttgctagtggagaaaaaaaaatgtttggtatttaaaatagaaacataaaattgttaataagtctacagacaacttgtattgcatgcagaaataaaaaatgaagtcctagtacaacaatactgcttagtcttggattcattttacagaagtttaagattcctcacctcaatgaatgagattttaataaacagaagtgtattagaatatttgcagcatccaggcattgggtttgagcctcaaaataaggccagggatgacatttaagtaaattcagaagtaaaaagcaaatggaaaacacttttaatgatgtgtcacataatgtaaaatgtgaaaaataacttagaggttatatactccatcctcttgcttcagggtccctaacaggcatctctcacttgagcataccctgtgatggggagctcactgccttgcagtgaatctttgattttgctgtggctccaaatgttggaaagtgattccttatgagataattgcatattttggaggttcccccaccacacacacatacacagaagaaatgttctcccctatagtaattcaaaatatctcgatagtattgcacaaatatccattaagtgtctcctatgggcctaaaactgtggacaattggagataaggaatattgtcgttttcattttgcctgtgagaaaaagagttttcggaggctaggtaacttgtccaaggaaacgattgagcagagatttgaacttaagctctctggccctggaatttaagctgtctggctctaggactaggccctcattccctgcatgatttcagaattcatgattccatgaatcatgtagggaacccagatataaatcaactgataataacagaatgtggcaagtgtgaacagaactgtactttaggaagctaggaaagaacaactaattctgcctgtccagattggaaatagtaagttttgaagacatagacaccatcaatgccaaagtattgttatcataatgttgtttcacctattttaagaaaaatctgtttcttctacctatgacataaacttacatttcagtatcccccacctcacctcgtcatcagttttagaatgtgctaaattctcaatactactgagaaatgcccttattccccatattgcaaagatttctggggctgcttaataacactttgtaccttctgttcagagaacattcatcttattctcctctcaaattctctgttaagtaaatttaatactacatagcatcaagaggaaagtgaccatttattttagatctgtatctatcttagacgatgtacttttcatggaatagtgagtgagacagacacttgagtcaggtgatgtttgaactaggatgttcccagaattaaatggtagtctcttaaattggatctcatgagtactttagtatctgaaaagtaactacatggaataaattaaacagaggaaaactcctggctatgccattattaaacttttttaaaaatatggtctttatttgacatttctgagtatggcaacccattccttggaaataaagaatgtggcttccaacacatgagtttccccctccctctcccctcccctcccttaccttcctccttcttccttccccttccctttctttcccttcccctttctttcctttcccctttttttcccttcccttccctcccctcccaccccttaccttcccccttcctgtctccttttttccccttccctcccctcctctttcttccccttccctttccctggcctgccctttccttccctttctcccttccctcccttcctcttcccttcccttctcctgccgtgccttgcctttctgtatcccatggaatacctctcttttgcattggaagaaaaacttgatcccttttggagctctttgggctttaaaggtttaagtgccaagtgaacgctgggcttgtttgcctcctttaggaagccccgtgtggatgattccacccctcattgataatcttcttactttacactcccctttctctgccaatttaaaatcattcaaaatcaagttcatcataatagtgaacgtcaatttacaatgctcttttccaagataacttcttttcaaaccctcaaaactattctatgaggtagagatgattcatagttgtacagttgaggaagcaggctcaaaaagtttaaggtaacttgttcaaagtcatatagccagtggacccaggatttgaactctagtcttttaacactcagtttacgtgttaccttgtctatgaatccttcttgatggtccctgctttccctgccgtagatcagtagatcaattccattctctattcccctgtgtgctttgtttatacctttgttctagcacttatcacattgtatttgggaagcagtgtatttaaatggatttgtggctggtctaatttggtttaggtttttttttttttttttcctgttagtttatttacttcctaaggcctgaaatctcttcttcattatttgacctgctggacttcatgcagtgctttgcccatagtatgtataaatttagtgttcatggagaaaatgaatcaatgcaccaaagtgaaggacaggggctgcggtttctttgtatcctgagtggaacctagttcagaggtacagtcacaatcacttttaaaaaaatgttgaataataatgaaatactacataaatccaatagaaattcttaaaatatttagaaggcatgttttctaggaagaaggctaattattagaatttattttttattctagagaagaaagagagaaaataaagaattaaagaaataggaaagagaagtcactagagagccctttcacgtcccagagcagattaggatcttgagagctctaccctactctgacaaataattacttataaaacaattctggggtttcatagcctgcattacctggttccagggaccaatcatgagcttcgttgttttggagttggcttggaggacatttataagaaacatgtgatgaagttgcccctttttctgcagaagataggcaaagagaatcccatgagttgggtaacatgtgggacagattttgcattccgtgatttgaaattatgggtgggggccgggtgcggtggctcacgcctgtaatcccagcactttgggaggccaagacgagcggatcacgaggtcaggagatggagaccatcctggctaacatggtgaaaccccatctctactaaaaatacaaaaaattagctgggcatggtggcttgcgcctgtaattcccgctactcgggaggatgaaaaaggagaattgcttgaacctgggaggcggagattgcagtgagcagagatcacgccactgcattccagccagggcggcaatgcaagactctgtggccaaaaaaaaaaaaaaaaaaaaaaaaaaaatgggtgggagggagggtgtttactccctgccctggagatttgtataaacaggaaaagaagactgttttcttgtttagtcttttaaactaaagacttttctctcatctggagaaaaaaataataatggtagtaataataataataataaaatgggccgggcacggtggctcacgcctgtaatcccagcactttgggaggccaagacgagcggatcacgaggtcaggagatggagaccatcctggctaacatggtgaaaccccgtctctactcaaaatacaaaacattagccaggcgtggtggtgggcacctgtagtcccagctacttggaaggctgaggcaggagaatggcatgaacccaggaggcgcagcttgcagtgagccaagatcgcgccactgcactccagcctgggtgacagagtgagactccgtctcaaaataaataaatacataaaataaaataatttttattattgatcatttttgtgtgtcgggtactatttctagacaatttacatgtattaactttaaacttgacaacaaacctattagatagatggtatgattactcccatttcacagatgaagaaactaaactacaaagaagctaagatcgagccgggcatgatggctcacacctgtaatgccagcattttgagagtccgaggtgggcagatcacgaggtcaggagttcgagaccagcctggccaacatggtgaaaccctgtctctactaaatatacaaaaaaattagccgggcatggtggtgcattcctgtaatcccagctactcgggaggctgaagcaggagaattgcttgaactgggacccgggaggtggaggttgcattgagccgagattacgcactgcactccagtcttggtgacagagcaagactccgtctcaaaaaaaaaaaaaaaaaagaggctaagatcttggccacgttttcacagcagctaacaagcagaatcaggatttgaacctaggccgtggagcaccagagcccattctaaatctgaatgcactctcaaagtgtcttgcagggaggtgagcccagtctgtctctctcagacttcaagaccatttgcagtggtccccatacctattgcaatgattctgaataaagtctcctgtaccaaaaaaataaaaagtattctctaaatctttaatattttatcctagaaacaaatgagattattccttcttttattgtgataacatattatgataactcattttatttgattccctaaaaccggacagagatttccatggtgctgaggatacgaagtttagaccttcgatagctagtctaagcttagtggagatctgatatccaatctaagcttagtgaagacaaacaggttgtaaatgcccaaatctctctatgagaaactaattaagccctgcctttgagtaaaagagaaaaaaaaaaaaatgcttctatattaaaataacttcatttggagttcaaaggaagctaaataaggttttcacaggaagagttcatatttttttaatccttaaagtaatgtgtataagtttcaatgaagtaaatgtcccagctacattattcaaactcaagagattaaaaatattttttttccaacatccaaactcctgatatccctatttcagccacagggaggacaagggcataactatggatgtttattagaaggataagttaaagaggcagaagcagtatatacattctctaaactatacatttatacaaggatgccattgtctttttttaagcaaatacttgtagaagtgatgtctaaaagaataaagcttctcttctatatctccaaatagaaaatataatcaaaatccgcttttatgtaggatggcttttttaaataaataagcagaaggatgaattatgtggctataaataaatctactgacatgtaataaagcaaagtcgaactgttttatggtgtcactgaaacccttagatatatttatagccatgttaacagtccccagtattttttcaggacttttatttcatttcacattatgagagtttagttgtttgtttttctctccctaaattgccttctggagccctttgtagagatagaaagtaaggatctctactcttcatatttggaaaaaaaaagggtcttcaccgaaaaagcttagggctcacacagaaacagtcggttctgatgctttctggtctgcctgtttctgtgcagttcatatgagatgtgcctgcgaagaacaacttgacaggtagctcctgctggcagcaaagtggcaagtcagagtctatacaagtgaggagaggcctgtgcagagataaaatgtacagtactgtagaaaacaagcagatggacagagcaactttgcattagattcctgatgcctgacacatttaaatacaatcacaaggcttatttcagaagccaaagaatctccagactatcacatagccgaggcacagaccaaaacaagataaagggtctgatgggtaaagatgctcacaccttaccctgggacattctcttgcagggtgaggatggggggggggacatttaaaaagcaagaggagaaggtttataataccagttctaaagcctgaagtaatataggggttttttaaaattgtattccatttagaaatttcaggatccaaagagtatggttaggattccgtggggggtttattcaagtggagctaagcgtggttgttcctgtgaaattatttatatttttcaacttgaaatctgggtgagcatagtgtttctaaatctatttctcttcttttctatcttaaaagtggactctcattttcatcctgtagctatacacttgattcccaagtgttatcactcaagggacccactagaaaagccaactcaagaggaagaggagagcttttgatggtaggacaagggatgacaaatccttcagctggaactctagctacaggcagtatttagaaagtatcactggagctaaaaatctttaaaaatgtatttaatgtgttagactaatataggctctaaaagacctaaaaagaacaggatccagaaaagaagtcgaaataggaatgtgttaactagagggaggggcaggagggataagaaacacatgaaaaaattaacagtggggtaaattggagagggacattcattttattaggataattgggggttgtctctttgtagtggaagaagtaaaatagacctgtcttacatttgtcctctgaagagtcttctcagtatttaactgtgttcccaaatggaatcagccttaccaaaattcacggtgacttcttttgacattttgcaaaaagtaaataaataaattataagtatgacaagtgaaatgaatagttccagctgtgatgcaccagcagcatttccagattttgtactgcattaaggatttattttctctttattgcctagcagagaattaattggaaggtccatctaagcttcccacacatcctcagaatgaagtcaaagcagtctccaatgctcaatgccaattaaaaaaaaaaaaaaaaaagaaaaacagtaagtgggtaggtggtcagtttatcaactctggaaaagcttgtctttgaggattcacactgctaaagccagacaaacgcatcagcaaaattaatggcataaggaaaatgtgagtatgagattggcaattgattcactgagttcgttcattcagccagtatttactgagcccgtatgatgtgctacctattttttcacacacacagaaaacaggagaaaatgaagactcagccctcagagagcttataaccattttaaggagataaactatgaacaagtatacagataaaataatttcagacactggagagtgctgtcaaggaaataaaacaaggtaatgggaggggatgccttccaggggtggtggtcaactttaaatgaggaccagagagggtctctgaggaggtgacatttgaaatgcacccatcacatgaaaatcttggggaaaagccttccagacagaaggggccaacaatgctataaaggccttgggatgagaaaaaacttcccacgatcaaagcagaaagacctggggaactagagagtagggaggaatggggcatctggcaggagatggagctgaagcattagagttaagcagagtcatctaggccgccttaaggccaaaagtgcagtggaaatccacctggggactaaatcaaggagtggttgaattgagtggaaattatcatggatatttaggatattaagaattttttctggcttttctagcaataatagcataagaccctaaccatgtacttaacctgttcttcacctttttagagcttcagcttatttttctagtggacaaagaatattgccactgtttgtcaggtgctctaccagatactgtatattttctcattttaaacccccaacaacctcgagagggaggcatattcctcattttacagaggaggaaactgaggtttcaatggaatgtccataaaccaccccttccccttgctgtggtgtccctgagagcatgctgctggtttaagacactgcgtgggggcacacccaaaagtatgcaagaccttgtcagagggccatttcctggggggctgtggatcctggaccacccttacaaatgagagccagggcagttagggtgactgtgtgcatcatttactacgggcagcttgaagcttttggaggacaccaatttcagaaccagaataccagttcactgccataaattctgaaatggacttgatgtatgaccttgaaggcaaatcacctgtaggtttggtctttttgttagagagacataatgctgtttcctcaacacctccttggggtgtctcaaggatgaatagggctgtcttaatccctgttctttatcctcagggggtttgaaatgagagtggagtatataataggtgctataagctccttttaaaaaagcctcctaaatacaacatatatatgttttaaccagcaagtattgttcactcacctccccttcctccctgcaaatgtaatgggctttttacccaaggtgaatggtaggagggagtcaaagctagcaagacctgtgtggacaacaacctggcctgagagggcagcctgttgggtttgtccttcctgcgcatgagacatactggaggggtggatgccgcctagtccacagtgttaccgtgtcctggcagagccttgggtcagtcccctcctggagtcacagatggccacgacagaggacaggtgctgccattctggctctcccctgcgtgttcagtcgtgaggtaaacaccgtgctgtctttgatgcccagcgcccaggggacttcacccacctggggcagcccttctgcagccagttccggacaggcgccagtcacttctctttgagccagccgacttggccctctccccttctgaagttttttgatcaggactacaggcgcggacgataacctctggattttgaatcccaacagtgtcctatccaccaccgggggtggcagccaccttctggaaggactgccaatcacggagcccttcaccctttggagtccccaggccaccgctccaccttcacttttgggagtccggactcagattcccatcattcgccctgcgggaggggccctgggcattttaaccccgggagacacacgcgcctggagagtggtcgcccaagccaccgccaggcagggaggagcgcgcgtgcggcaccaccgcgtgcagcagctccagcgctcgcgctgcctcaaggggtttatttttatttctatttggagctacttcggccttagccgccgcccttacttttcctccgaaattgtgagaaggtgccttcatggctggagtttggtttcacgcgcctgggagaagagcagggcacgggtgataaagaaggcgcagtgtcggtctgtcggtgtcacacacgcgcgcacacacggcggggcgggagccgcgcgagcgagaggagggcgggcggcgtgtgctggaggctcgcgcgggtgtatacgagcctgtgcttgaatgggaagggccgggattccgggtcgctctggcccctccttcctccggagccagccagtccctcggcagagcgctggggctgcactgatttgctctcgggagtgcgctatttgcatatgacttgcccatttgtgaatttggctccccaactcctcgcttcacttcacctgtgcctccctggtccgcgcacttcgcaggcgcccgcccgcctctcggccacctctgcagcctgccaggcacctcctcttgcgctctcgctgatttcgcccacccacctccctccaccccgtgccacgttggtttgggtggctgctccgcaccgggttcctcctcctctcctctttccctccagtccttcttattctcttcctctggctgcggtggctgctgctgctgctggttttcatccagttgggaaacccaggaagccggcggctgctccgtggcgctagtccagcacgcccagggttaaaagcctcgcgcccttccgcggagactcccaggaacacccgaagaactcttccacctgcagcccccttttgcctggcagttctgcattgcatctcatggaagtggaaacaggaaaataaaaatgttcaaactccttggatgttgggataaactcacctgaacccacttgggttcgggctgcctccttctcttccttcattgccacctttcctctgtgtggctcccgggagtgtgcggttaagtcatcagactcgaagtgcctagagatccggaggaagccgcgccggtcttcccctgacatgcgtggcatgccggggctccgtaggaggtttgctatacctgggaggaccctggcattctaaatttcagctccgggaaagagaaggggctttttgccttttatcttttttttttctttctttaagtagtaattttttaactgattcattgtttggaaagcgcatattgcttccctcttccccgaattctggcaactcttcctcctgctatgatgggcccttgggcatcatgaacttcattactcctcactggctggaattcaaactgcccatctgtagtggtcccgtgcgttgaccatgcacctgagaatccacgcgagacggagccctcctcgccggccggcctggacgcttgggatctggttcctgttctggggatgtatcgtcagctctgtatggagttcttctaatgtagcttcctcctcctccacctcttcctcgccggggtctcactctcagcacgagcaccatttccatggcagcaagcatcactcagtgcctatttctatctatcgttcccctgtttcccttcgaggaggacacggtaggtctctctgctctttatccttttaatggggcatagcaattcgctaacccactagccttgcaggtagtgtcaaaggtgggaagggaatttaaaaaaaatgaatttaaaatgatgaaaagcatcgtatgtccatgagggaagcaaatttctactttctcataaaggttagtgttttctgcccctagcctccgacaaccatctccacttttctctaaagggttcttttccccttagctccctcattcatagctgcacagacaccacactctctcttttgcaaccttctactctctccacccccacggagacaggcaacttatcaggtgagtcccagtgctgtacttggagaaatattcattcaccttgctttcacccttctttgctgtggtcttgcttgggagctagtgggggtggggtgggaatagctgacaacaggaatcaggttttcagcctgaagttgattgaactgttataaagtagcctgtgtggtaatggtcagggaaaagtagccgaacataagaaggcagaaaatataattaacaacctgtggccatttgtgttgaatttggcagctttatgtttgtccacatatctagtggaaaaagcagctatctctaaaactacacatctactattgctatcagaaaggaagcaatatgtaagataaggctaagttcatttataatttacccaagtgtaaatgacagtaacttggattccccgtgtatgcaaatgttatttcatctttaggtagcagagatgggcttgttcacacaatacaggtacgatgggttttactccaaacaaccctccttacatggctattgagggaagagatctatggctctgaaaatgatactcagctgttagccggctgcctctaaaagggcgatgtctgcagctaaggtaggagcttgctgtggtaaactgttctaaagaaaggagcttcttaatttgtttactatgcactccactctgatggtaaggagagtaggacacacagaaatggagactggtcttgcttgggagctagtgggggtggggtgggaatagctgacaacaggaatcaggttttcagcctgaagttgattgaactgttataaagtagcctgtgtggtaatggtcagggaaaagtagccaaatataagaaggcagaaaatataattaacaacccgtggccatttgtgttggttttggcagctttatgtttgcaggaacagccctccagggaacatgagcgtgaaccatactagggggttcctgcccttgtattttgaagactgataacatccagaccctatttggaaagttgattcttcctgctgcctcctagccctgagctttggctttatgctgtctgtagtgtaagtggaagcacattgagaaaatgccagcacatactctggctctttttgactctgtctttaaattttatttgatggagttgtcaagcagctcacagcttgtaaggttggtggagggggatggtgaaaagaagggattgcttgatcttgatctggtggctcttttctctgtgactcctgctgggtctggtgttggctcccttaaaaaagaaagaagcaaacaaacctaggagaaaaaagagccacaaccaccaaaaaagcaatttcattgacatggaaacttagctcctaagggggagagggactggggggagcgggtaagacaggaaaaaaagagggagtgggagataggggaagccagagagactgttactaatagccataattaaacacggaaatgctcagagattagctaaattttgctaattactgtaaatgatcagcagggagaggaagattatgcattacaggttatgggtggcagggtcttgatatcttttgttcgggttgtaaacagttacagcagatactagtaagtgatggaatttgcagagcagtacttccctagggtccctaagtcagagtcagtctctctctctctctctctctcataaaggggttgagccttgcacaggttaaacatgaccctttatttagtttatttcttcaacgattggttgctcagtctcctttaaatctttttgactggtccccagtctagtttctcattaacctacatctgataaggttcagtgtgatggaaaataagaagaaagtaagtaaatggctagagaccccagaaaaggccctcagactcaccagagctgtagagtacagtgaactccatccagggtctggcatggctgagataagaaaactcatgaattcagctcttcagaatcctctttcaatcctgaagtcccaactcattgatttggggcttggagagtgaatgcatctgtattaagtagactccttgcatatttaattggtgtttttgagcataaaatcaagagaagcagcaatcaacaaaatatccctacctctggcttccatcctgcacccaagctgtgaccctttgcgtctctaactaaaaggaccagaagaccccacagagctttgctaatgcacttctcattcttacttggtgtacacttgctttttcctagtccaagacaaagacctagctaacagcaattgttttaaaaaatatttttggatggaggtggtaggaggcatggcaccaagagactgatggttgttattgatgatttactgccaatcttattccagagttaaaggcagcactctctgttgtctgtgaaaaagtaaatgcccttgattttggtatgaaagaaaactagagccttgagtccaagaatcttctttggacttaagagattgttgtttttttaactacacttgctcttcccttgcccatttcctgagaagccaaagtcctcaaagctgctgttcatcagttggtgctcccaccccctttctctactatccagacctatagagagattcatgctaagacagatggaagaaacagaaatcctccaaatagctgatattttacctacacttttgcctgtgcttggttccaagctttagaaaattggttatattatagatttgcttaaagcctttatcccaggacagcctagaggatgctgggattctttgtaaattagggagactaaggccacacttacctggggtgcccccaaaaaatctcacattaggattgtgtttcaggataggattaaccttcttcttaatgggaatctagtaggctcttccccattctgttagagtcctcaccccactttcatgctctcttctgttcaccagtcagtcaatactctttgagcacatactctgtgccaggctgtgggctactgctgaagatacagaaccgaataagacattgtggtgttcagctaggaataattgcaaaagtatatatatatatgcttccatattttaaaaagtgcaaggagtgggtggagatccaaataccaagcgaaattaatacaaaatcaaaatatcctttataaaatgaaggtttacattatcctgttatttaaaatatccctccaggttccttttcatccttggctttatttccatatgtaaatatcattttttatcaaagtgcaaggtagtttagtgattacagatatataaatagtaaaatatatttgtttaccaagctttaattacataagcaacttttgtatattttttccttctttttttccctctctctcttaaaggtcattggacctttaagaaatccaatgtgtctgggcatggtggctcacacctgtaatcctagcactttgggaggccgaggtggggggatcacctgaggtcaagagtttgagacctgcctggccaacatggggaaaccccgtctctactaaaaatacatatatatatatatatatatatatatatatatatatatatatgtatctccaatgtacatctgcctaaaaaatgcttcagtatttatagtttaaatgcaggtttctctaaggattcaaggttttatatgtaccttaaatgctattctctataaaacagcagactttcctgcctctgtagacgatttgtggggactagttgaggacatggaactcttggaaagctcagttttaaaagggaacacaccacgctatatttgcaggaagaactcttgctcagaaaccagggtgtgtgaaaagggggagtataaaagtcctattcaaaccatcttagcagaagtggtggtgatgggcccccttgtgacacatgatcctggagtctttcttggactcattccttgtcccagggatccacccccaaagttttttcagccttgggggcttgttttgctttgatctattgagtgccttcttctgctcagccagctgctttctaaccactttctttatgcctgccttcttgagattcagggagttgaataattcatagtgttggttgacagatcaaatgataagatttatatatctttggccttggtgatgaattaattagattggtttctccatctttggctcctctagatgcgttgtttttcttctttaaaattcactggtgagtggtgggtctggagattaacttgttcttgagagaccaccataggatgattataatatcctagtgtcaatttcttcaggactttcaacatggatcactgggtggtgtggagtaggggcagctatatcatagagaggagagataagatcatcagaacaaaaaacaagacgcacacacacacacaaaaacttgccgatactggctgcgggatgaaattttacagtaagaacttgattgctttcacctcagattttgaatctaaaagagaaatgtatttcattttacattttagtaaatgaacttatcagcccaaagaagtttgctttactagaactctgggtgaccagggagggaagcaaatctctgaagataaatcttgaacttactcatactttcctccttgtattagtttgctagggctgccataaagtagtaaagtactatagactgggtggtttaaacaagagaaatttgtttgctcaaggctctgtagagtaaatgtctgagaccaaggtgtcagcaggtttagttctttctgacatctctctccttggcttgcagatggctgttttctcactgtgtcctcatagggtctcaccttgatctacatgcatgcatccctggtgtctttgtgtgtccaaattctcccttcttataagaacatccatcagattggattagggtcctccctaaaagcctcattttaacttaatcatctctttaaaggccctgtcctcacatacactcacattttgaggtaccaggaataaagctttgacatatgaattttgaagagacacagttcagcccctaatgctctttctcctcaccgtgcgctgccccccaccgccccccaccatcccccgcccagttattgggaaagaagtaaaactgtactgttcagtgaatacccattggactcaaactttcacagcagaaaaataaaacttcagtgacaatggttgcaatttacaaaattcataagatagtgccctaagaggtaatgttgtgtttacagatatggggaaaaaaacagctattggttcagtgaagacttgtgttttctttcttctcagtttatcttctgtgactgagtccagatctttatttgcacatagactaattctgtctgactgcagacacatgctctaatgtccacacattaaagctttctttacctagacctgctacccttctgacccagaccctccactcctgccactgactcctttatgaactacagttgtttgctctttgcctttcctgaaacacaaattaccaactactttcacatctcagcctttggtgaaaacaagagaaaaaataggttaactaagtataaatttctcgtttttcaattttcatatttctcaattgaaaaatatgttaaataggcatcagtttaattatttttctcttcaattttattttttgaaagttcatctgaaaatataaatatgaggtaaattgtctacttcatgacatggttatgaagcttggtgagatgattgagagaataatatatatatatatatatatatatagtgtatatataagttctggttgttctaaatcctaagcaaagcattccatctttggggaaagggtatacctttctttgtctgtttgtttctgtgctcaaaatgcgtgctgatgttgataatagataaataataatggcattctggtggacagtgtggtgttaggtgaggtgggaacaactatggttggaggaaatagccttcaacctcaacctttggttctaagaaactttgtctctaagaaactaagttactaagaaacattgtgaacttaagtcacaatgaataagtcacttggtttcactgagactcaatttcttcacctttaaagtgagcaataataatagttaaccatacttatatcacagaaattgtatgagagattaaacaagttgtattttgtacattctaaaccaatgtgtacaggttaaatattttatgagacatattttcatgataaggctgccctctttgaattccttgcacaaagaggagcttcaatgttgatcatttgctggttggtagatagtggttaaagaacatgcatctgctggttctcctcattttcctatctatacatacacttttttgcctcctagagattatttcatttacatagtactctgagtaaatgtagatgagaaacactttactgtattttcatgtttatggcactagaacacagcatgggacaaaagtcagcttgtgatttttggtaatggtctgcttaggtagaaagtcatgccaggcaaattttagcatggaccaacacattatagcaaatcatttagaagctcagggattcagtaaagtgaaaagagaggactccaagaaatactctgagatcattttggaaattcagaattggatcccatttgcagtaaacctgtgcagaattcaaacattcctacatggttctcagtgtccattgtaaactaagatttttaatctggtttgtgctgggaagaagcaggtgtttttagggacaactaccttcagatgtggaagtgaagtacttcttttaatgcaatttcttaggcttactagggctcaaagtttgtagagcagataggagcacaatattatgccagaactcttagaattgactttgtgaagcctgaatttgaaacagaattcttactgagagacatggtcctgatacatagattttgccccagttttctccctgaccagctctgtaactttgaattataacattatatttttaaattatattcatcttttaacttttagacattctgtgtgataccttgatttcctaacctatattcttggctttacctgtagttttctgcatggcatgtagtatgaaagctccttaataccatagctggggaaaactttccttttcatatcttcatcatttgtacaatgagagatttgagtgagatgatctctccaaatgttttccagcactggaactgcatgagtctctgatttgtatgtctttaaagacaccactgtgcatcttaaacctatctgagttccacaagtctgccagtattttataggtctattttcttgactatcataataacttatgccaaagccataagccaggttttctcttttcccctcagacagaagcagcataatgtaccagagtggcacactgtgatgttataaagcccacaatccaacttcagtgcagtcacgctgagatgggaagaatgcagctttcatttaaacacaccttaataatgctagaaaggagctctatgttatgtttaaaatattctgctgtgtttagccatatcagagcagggggcagactagcaactgggtttataaagaggaaatggtttatttctatttacagttaggattttgagagagacttgcttgagttatacaccaacacataatgtacacccactgtgtgacaggtactcttccaaatgctttacatatgtgacttcatttaatcctcactagcctttgaacctaataaagtgactattttacgattaaaaacattgagactcagagaggttaagtggcttgattaacatggtgttaaagccaggattcaaacctggttgtgaccagaaaactcttggtctttctgctgtaccacacagtctgtcaactcaggaaacagactacacaaacacatcaagctcttttgtcaggaatcaagtacacagattgatgaagcactttgattaatgcagctaacacacctttccaaagcatctacaagactttccaattcctaataagtatttgaatgttttccaatctgcctgaacccgtttcaacccaaggagatagtaaataaaaggagcagactgatgaaacactcacacttgatatgtctttttttttgaatgaatgaatcaatgaataaatgattgagtgaggttccacatgatcaaatctcttgcactaggaaaggagggatgctagtttataaaagaagcaaaggcacaggaagttatgcacccttcaaaagcacaccaatgggctcgtagaacttagagatataagagagctcaatgttccaggtaggcagggtgaggactcaactaagagcatccagttagtgtcaggactggtcaggagcacagacatcatgactctgagtccattgccttttctttcctctacttctcagtccttcaagacactttcttaaattacaaacttgttccccatctctctttcttcagagaaatctccccttatccagattatgtcctgcaggcacatattctgccagtgttggacttgccaggccttccattaaaattaattattggctgggcgcagtggctcatgcctgtaatcccaacacttgggaggccaaggtggctggatcccctgaggtcaggagtttgagaccagcctggccaacgtggtgaaaccccatctctactaaaaataaaaaaattagctgggcgtggtggcatacgcctgtaatctcagctactcaggaggctgaggcaagagaatcacttgaacctgggaggcagaggttgcagtgagccaagatcacgccattgcactccagcctgggtgatgagagagaaactctatctaaaaaaaaaaaattaatcatgagaatccttctaataggttcctggctttgtgtgccaaggtagggtttcttggtgtgttctgaaggcttcctttgtataggaaacctcagtgtgaaaaagtgctcagattcggggttctgtgaaagatgcttcctgtcctggttggatgtcacttgccagaaggcaggaaagaaatggcctgtctgttcacctgttgctgctcctcatctggaagttgtgaccaggatcttgtttgaagacctgtccccagccccagtcctgacctcttgcttaccagctattgagtggctatgaaaacataaagcccctggaaaccagcaagccacattttctgagatactgtcctgccctcccttttttattgttttgaaatattcctctcacccccccacgttaaaacataaccatgtgtattcactcctgagtgactttcccccaaactatgaatttcaactatttccgaggcagtcgttcagaatttgaatataattacactctttgggtgaaaattgtggtttttgctacataaaaaactaatggaaatgatctgcctgttcctgtagtttacagattatatgcttcagaactgacgatatatatttaggctgcttttctgtgtggcacatttaaatgaaaatgaactcggggtgagccaccatggttgctaggcaatagagcgggttgatagagcacggtattaaactgaacccacattggtgttttacttaacatctatttgcttagcacctttgtcatctgtggtgtcatagaagggaaaggaggaggagacaggcagagtctggttatctgcagagactcaaacaagtaggagaaataatcatcccaaacaccaaagtgacatgagcattttcaaaaatttgaggttgcagcacagtcaactcatttaatgaagaacatgcaagacctgaagaaatgcataagcatagcagacatattcatggatgtggtagcaagaggaactaaagagattccccaggctgggttttgctctggtggttccagaaaaaaaaaaaaaaaaaaaatagccaccacgctggttgaaaattttaaaaatgcgtctatgggtcatttaatttcctggcctaaaatcccagatttatcatgagcaagcggtgataggcagcaaaagcattgcggcttctttacaattgataactaatagaggaactccaattgctttgaaaccctggttttaataaaagctgaaagtctcttataagaaaacaactggatcacaataaagcaaaacctcgtcagactctttgggtccattctagccactttctgatacatttaaaagtttgaaaagatgattaaagggttaaaactcagctgtggggagaatttggtctcatgaataatttgggcagagagaggatcctgtgatttggatagccaaagttttattgtttattttttccaggagccaattattatatatcttttttcattgaatcaatatctctgcataatggaatggtcacctttgaatgttctcttttcttaaaacaaacttcttagataagttaaacacaagatgataggaaacctctattttcataagaatgacaataacatctactttggtttttattatagcaattgatcactttttattatgcctaacatttttgcctttcaatatgcctgacatttctataaacgttatagttcatttaattctcccatgaagtaggtggagttgttttcccattttttaagttttagttatttattttagcagagatggggtcttgcggtattgtccagaccagtctcaaactcttgggctcaagtgatcctcccaacttggtctctcaaagtgctgggattactggcatagccaccatgcccagcccattttcccactttaaagaggcagactcggaggcatggaaagtttgagtcagttgcctaaggtcttataggtaatataaggcacaatcaggttgggtatttaagcagtttgaacctgtcctgttcaaactgcttaaatacccaacctgattgtgccttatattacctataagtatatactgaaattatactgaaaacagtatactgaaaacagtacaatatttcataaatactcttaaaatttcagtatttatgaaatattacctgaatggtgggaaaaaatttcaaagtggtattcttaaatggaatactgggccatttttaaaaggacctcttagggtctacctagatacaggataaattatgaagacagaatattttctaaacaggtaaacacctacctcatatgaggtattctaacaaatactttagcttactgcatttaatctttactgaccatccttcaaggtaggcactattgttatcatgaatttacgggaacagaaactgagccccagagggttaagcaactcactctagttcttccacttactaagcagttagcctatagcatctgttgaactcttaggtcaggtaatctgtgcaaatgtagaacagttcccggatactgaaagcaactaatcagaatgcttccctagattcacaaattctattacattataggagaggcttttcaaaacagcctttggaaactcacaccagttccagaatctgctggcaatgaatagttacatctttacatcttcaatcaaggacccaagagtgagggaccccctctcctttgacagggaagcccattggtgcctcattctcctcatgtttaattcactctaagaatccgtttttttcaggaagtttcttttccagtaattacgataggctttctccccaacttatgattttaggcaagcaaccaaactttcctgattttaattctctcacctgaaagacagggaactgtgaggtggcctgccagctttgctttcaaaagtgtggcattcatctttcattaatgccaaaaggcaaaattccaatgatttctaaaatacttcctcacccttatcagatcttattagatcaccttgaatctacttttaatcttggcccttcatacatatggtagtagttctttaaatatgagggtgaaactaatgaatacgttaagaggggcagtgggtttccaacttgagtgaatatgtgtgtgtttgctttcacatgtaggtaaatgtgtgaaccaaaataaacgatgtaacagaaaaccttcatagcagcccaattagttcctagcttagaatgtaaagatcagacatgagaactaagtctgccgtgcattacagacgtagggaggtttcagtacctgcttcttactgctctggtatcatttatcagtgcagtgttgtcacaggctcatgtcaacatgtcaataataatctcaggagaggatagcttttatgtgaaataggaaggtaaacctagagtcttggccttatacagacaacccccttctttgggatgactagtgttttcatgtttcttgttttttccatgccagggagccattttatgtgtgtgtattggtaacctcatcaactgttagctattaaagactggttaaactaattattattaagaactctctttcagaaaatcctgagatagttccttttacttcccttcacaaagtaacttgatattggtccctgagaaatagatccacaacctcatcaccaagttctccaggccctgaggaatgatcatgcccctaaaataatgttctgatgaaggactttctttggactcaaaatctgctttgcatttgtggaatcatcaaatgcgaaacctgcaagaggtctttagaagcccttttcaatcaagttatttttcatgtgaaaaagctaatagaccagaagtttgtgaatagttttcccaaatcacacttttcaaattagaggcaaggcgagggcaacgtgcaagctttcagcttcgctgtttagtctctttctagtctctttctactgcatcacaatgttagcactcaggctttccaggtgtcatctgttttgctgtggactgggaaactgggattgtctccagcaccacttggataacaaatgagcacagaaggagcagagagcagcatgacaaccaagatactccaaacactcgcactgtttcctgtaattaccatccagagagcagctcccactccgtgtcaggcatgtcaccccctcacggggtctcctgctttctctctgccccagcagcctagaggggaaattcagcatgctgcatttcaatcaaactgtttgatgagagcttttgagcctaattacatggaaggttttatccagtgaaaagaaagaggaaagagaaagagagaaattaaattgaagtataaatcagtcaagagcttagatcccgcgcttgctttctttttaatcaagagtgaaatgagaggagagttttaaggatcatcacaagacaccattaactacccaaggagctcttggctgaagatggtttgtcataaaaagaaaagtgtacaatctgtccataaagaggaagtatctgagggtcgtgctgcagtttaggagcatgacactaaaaggaaggacgcttggtttttccgtgattattttatctttatttcccctagatacctagcatattttctcgcacacattaggtgttcttgttctgtattttaaatcaatgacttggtaaataacgtagtgtgttaactcaggtaattattacataggaaagggtatgttatcaactcattcaatattagatacaacacatgaaatcagtattcaaagttttggccagtttccctttgtggttgatgtagtttgggcatatccctctaatattactgttatttatagaatgctttacagtgttacagagaaaattcacggtaattatttgatccacagcacagccttgtgtggtaggaggacaggtagtatgattgttatttattccatttttttaagctgatgtaatcaaaaccaaagaagcataaatgacttgatcagagtcatccaagtattaagtgacagagcaataactgctacccagcttctattacatcaccctgtatgacctagaatcttgtacagaatttctgggttcttcagtataagaaggataggtaaacagcagagaggagtgtttgcaaaagaaatgcattggaattcatactttattattgagtacttatgatgagcaatgcaaggcactggtccatgctctgaactggaatgtgaaacatgagctttgtccccaaaggcttacagtgtggttacaattcattaaaatgatacttagatctatcctttccatctctattgcattttcaaccatatcacctaaacagttgtgacaacctcccttaacagaccttccttagcttctgtttttccctcctgtccatgtttccctcaccattggagccatccatctgaaacaccagtctgatcatgccgctcttccatgggctcttcgtgtcatttcctctgtactcagaacaaaggctggccccttatctttatgatctggcccctgtgtatccccaacttcacctcctaacatatttgactaccttggccttcatctttttctttttccttttttccccccttgaatatatcaatcttgctactaccatagtgcctttatttgatcagttccttttctctgggatgttttcatccagattgccgtatggccactccttcttcttatacgtcaggcttcaacttcaatgttatcccctcaagagcccttccttaatgacccagtctaaaaagcactcttttttagaaggatcaagattatatgaaaaaatttaaaaaaataaaaaataaaaagcactctttcaaatgtctctccagcataccaccttgttttgttttcactgtagcttgaatatctctgttacagttccttatgtgtgtattgcttccattaacccactagaatgaaagttctgagagcagagaccttgctgatcttgttcatggctggactcccagtacctaaggcagtgactggcaaagactgagttttcataaatcttgctgagtaaagggatggatgaataaatggcatagatgcttcacaaatatgggctcccacctagcattttaacctcaatactcagtaggccctttaaaaacatcagttttagtttgtacttttcccttgattgagaatctctcctatttggtagactgctactaatttttcacgttgcagctgactccataatatctggtctgcaaagttttccctatctcccactgcacagtgagtttcccagccttctgtgtttacttttttcgctatagaagttttctcattgaataacaaaaattattaaacatatattcagtcttctactgttttccaggcactgtccagggtgtcagactcttaaacatacatcagatttgggccttgcctacaagaggttcacgccttggtggaagagctcactctcattttattaaacatgtaacattgcattgctgttatttattgatggtgattgttttcctcattaggctctgcctttcttaagggtaaggaatgagtcattcatttctatattttgattggctgacatagttcttcttttacaaaaggtgcttaatggcactcattaatgaaaaaatagagtgagtgggctgaaaaggtaagaacatacagtattttaatgcacgttgtagtgtgacaaacatcatgagataagtagaaactaccgtggggatttagaggggaagatgtcacaaccaattaggtcattaaaaagtgcttcatagcagaaataaactttatatcatgttttgaagaattatttccacaggcatgcaggagatgggctgaaatatacttgggaaaaaaaaaaaaaccagatgttccagaatcagtgactccatttgctgagttatgggcttgtagagctcagttgtgagaagggctggtgaaggagtttggggctctttgatggaggacgttgagtaataactataattataatggacatctttggcatttacagtttgcagatcagtaatgtaaatactatatgacttgtccctttcaattgccctgtaattcttttatcatgatcactatttacaagagaaaaaaagggtcaaggctgagaagttgatgcttaaatcttataggatggtgctgtatcttttcaaaatgtaaaactggttttgtaaatccctggcttaaaaagataaaacaaaagcaaataaataaataaattaagcctctttcttcactgtttccagtgccctctaaatcaagataaaaatgtttaatgtggcctagcagttcctgcgtgatctggcatcactagcatagcacgtttagcctcatcactcaaaggtccttctgccttcttgattccagcgccctggccttctcccaaccattcatattcaccactacagacttgcctttgcttatcctatttaagcagaatcctcacttcttcctttgatggtcacctactcagaactaagaactcttctttagtgtagcacctcctcaaggaaatccccctgccatttctttgagaaattcaaattcccaggccataggttctcataaccttctagaactctctcctgttgctcatttcacaattcctttttatacatttggttgtgagattatttgattaatatccatttcctaagtagattccactggggttagacagggttgttagaaaataaaaatgcaagacagccaattaaatttgtattcagataaataactgactttttaaaagtacaggtatgtcccatgcaatatttggaatatacttataatttaaaaattttgttgtttatttgaaattcaaagttaactgggcatcctatattttatctggcaacctatattttatctcatcagagactatatctgtttttttcttctagcataatcactggggttgtaacaaacaggtaatcatctaatgttggatggataaataaaatgagtttaaaaaatattctggcagcgcatgtaggctgaattggaatgacaagagactgaatttggaaggactcattagcaaactttgaaaatcatcaaagggaaagttaaggacagggtggtggcattgaggctagatagatggagatgtatagaaggaacatttccaagtggggctcagaatttgcacaggtgttattgggtagcaacccagcactgcgaggaagaggccaaagggccatttcaaattattagtgatcaggattaaaaccagtaacggagagaaaaataaatataatgcctctcatttatatagtgcttcacaacttttaaagtgctgttttatgttccccattatgccccttggtaggagagtattgtttctaaaaagacagccatttaattatcacttttctttataaattcaattacatttcccagtccatgtagttcatcagttcagagatgtttgtcttcatttctgtctattttttaacaggtttcttttatttaagttcctcatttctcagtcctgaatcctttatttctgaagcaccaggtaattttgtattacgcataacaaatctgaaatttatttgtatgagcagattgattttatatccatcagattttctaaaaatgggctataactggcttataatgacatgaccagccagaggctaatttctgtggtatttcttcctgatgccagaataggtagacaagtcagaagcacccacttcagataataaagatataattccagttattcaaatttgtgttgaaagcaaatcctttcactgcttatttttcaattagtgccaagtgtggctccatggcttctagctacagaaggccaggtgatcgagcattcttaaccagatacatgaatagggagaccacggttctgcagttgacatttcttcagctgctctttcagaggtcttaacattttttctcaccagatacttgcctgtgagctgctatttgaaagataaggtgtgctgagtaaatgattaagcaagtgagacaataagaagcaacgtaatctcatcagagactacatctgtttttttcttctagcgtaatcactggggttgtaacaagcaggtaatcatctaatgttggatgaataaataaaatgagtttaaaaaatattctagaacaggggagaattctagaaggttatgagaacctatgttctgggaatttgaatttctcaaagaaatggcagggggatttccttgaggaggtgctacactaaagaagagttcttagttctgagtaggtgaccatcagaggaagaagtgaggatgctgcttaaataggatgagcaaaggcaagtctgtagtagtgaatatgagtggctgggagaaggccagggggctggaatcaagaaggcagaaggacctttgagtgatgaggctaaacgtgctatgctagtgatgccagatcacacaggaactgctaggccacattaaacatttttatcttgatttagagggcactggaaacagtgaagaaagaggcttatttatttatttatttatttgcttttgttttatctttttaagccagggatttacaaaaccagttttacattttgaaaagatacagcaccatcctataagatttaagcatcaacttctcagccttgaccctttttttctcttgtaaatagtgatcatgataaaagaatcacagccatgtagaggacgaaatgtgagcttttaactccacatacctgagtgtcactgatcactctctcagtaggtcacccagaggttagcaaacttttcctgtaaaggaagagagtaaacatttccagctttgcaagcaatatagtctctgcctcaacaactactcaacactaccactgtaatgtcaatgcaactacagacaatatgcaaacaaatgagtgtgagtatatcacagtgaaactttatttacaaaaacaagaccacctagtctgcagacccctgcccccagatttcagcttcctgttatgaaaatggccattataaaacctatatggcacagttgttgtgattaaacatttttacatacccaaaaaacttagtaaagaatcaggcatattaatgagagttcagtaaatgctaacctgtatcatgattataagttttagggctgcaaggaatcttgggtgtgacagacaattttctcctttcaaaagatacctagatggaggattcaagaagtatagggacttaaccagggttacaggatctattttcccgcaatcctatttgtataccacttccagaaaccccaagaaatatgatggcatgaagccaagctatatattgcgggatatttgagcatccattcagcatgtatgcattgaatgtcagccatgtataagacattgtgcagtatattgcaagtgacacaaagatcaataaagttcctgcgttggaaaatctaacagtttaagtcaccctagtaactataatgaggtggaaagcgacaagtatcaaaggaatgagtgacccctacgtgccaagcactatgttgaagtgcttacatgtgttgtctcatatgatcccccagcaggtggatttttagcatttcatcctcaatgacattcaaatgttaagtaatctgctctaggtcaaaagttactaagtgatagaacaaagatttaaactcgtttctctaattgcacagtgtgctttctaccagacgctggggaaatcctcatacatgaagtatggtttagttagctattgctacaaaacaaacaacactaaaaagttgtgtttaaaatgggcatgttatttgcttgtgattctgtgggtcagcagtttagacttgactcagctgggtagcttggatgatctcacatgaggtccctcatatagctccagttatctggcagatagacgggggatgatgatggtctaatatggtctcacacacatatctgccagttggttctggttattaggctgaggagcctcacgtgatatctctgtgctttgtgacctctcatttggctaatgttgactgcttcacttggtggtctcagggctgcctcccagagaggtatataacaggagcagcaactcttgagagcttggaaatcatacaagaacactttcgctgtattctgttggtcaaagcaagtctcagaatcaggctagattcaatgggcagggaaataggtgacgtgtcttagtgggaggaacagcaacatcatactacaaaagggtgagcgtgcaaggatgggagggtttcttgctgtgtttgccaacaatttaccataaagtgataactgagttggaccttcacagaaaataaagatttgggaaataaagactttgccagagcagggattataaagaagagcattacttcagattagctgagaatgaggccacacgcctatattgcattattgaggaaatttcctcttgcctttgctccacaagcacattgcttctactagttgcagggacataattaccaatttcatatatataatacttctaacttttcagaggatttttatttctcctatataacgtttaatatgctatatagttttgttgcattgttttactctgctcattcctttcctctctgtaagttggtgtcgtcattgcaacaaagcccaggttcccagctcacttcccaaaagacaatcatgtggactatctgctgtgattgactgtggctgagtgtttgccctggcagcttttttgttgctgaagatgaaagtttgatggactttaagatggaaaggaaggaagaggagaaatttgatttcatcggcagctgtcttactcatcttcattaagatgggttgtggacacttcaaggccattctgaaccagtggtcataaaactaataggtgccactcaacctgcgctgctcgtattattgcctgagacctgtcatctcggtagttattgcaaaaggagaaggaatctactgtagggaacacaatggtccttgtgtgacagaagtgaaactgaaagaaatagatttttctattagctgcaaatcaaacccttgcacatcatcccttggaggtgacagtgcctgattctctaaggcagggttcaaacaaatcatttgggcttgcagaaaataatatgagattaatatccaagtgtgtgtgtgtatgtatttgtggggtgtgtgtgtgtgtgtgcgcgcgcgtgcatatatgacaactacgtggctcctcacttgaagttttggaattagctactaatatatgtgtatgtttaagggatgcatttgtggacttgaagttgaaatagggaaactgagatgtattctgaagagggaaggagaagagggaatccagtcctgattaggggaatattgaaataagtaggtgaataatattcagtctcccaggtttgtggctatgagctcttttcttccagaagtatttgctgaagggagggaagaaaacactccttttcttctgacaatcaaacttttcaaatgtcagcatgcatgggtgtttctctctattcttgaggctcctttttgtttcagtctaacacctcacatcctgtgggttgtaataataatggtagcagttaccatttattaagcccttgtcatatgccaggtgctttacatatattacagtgtttgtaatccatacaagaattattacaagatagatatcactatgcccaggtgtgttagtccatttgtgttgctataaaggaataccggaggctgggtaatttattagaaaaagaggtttattgggctcatggttttgcagactgtacaagcatggcatcagcatctgcttggcttctggtgaggccccaggaagcttttactcatggtggaaggtaaagaaagggcaggtacgtcacatggcaagagaggaagcaagagagataggggaggagttgtcaggctctttttaacaatcagatctcatggtaactacagagtgagagctcaatatttcaaggagggcatgatatggttcgactctgtgtccccacccaaatctcatcttgaattgcaatccccatgtgcagagggagggacctagtgggaggtgattggatcatgagggcagtttcccccatcctgttctcatgatggtgagttctcaggaggtttgattgtttaaaagtgtgacccttcccctctgtctcactctcctgctgccatgtaagatatgccttggttttccctcaccttctgccatgattgtaagtttcctgaggcttcccaagacatatggaactgtgagtcaattatacctcatttctttataaattacccagtctcaggtagttctttatagcagtgtggaaacagaccacacagaccaccaagccattcatgagggatctgccctcaggatccaaacacttccctccaagccccacctccaatgttggggatcacatttcaccatgaaatttggaggggacaaacatccaaaccgtatcaacagggaactatagctcagggaggttaagtaacttacccaacaacacacagcttatatgttgcaatgtaggaatccaaacccccaaagcttgtgccctcctactgcgctaccctgcctcttccaggcttggggctttagggaatgccctttacaagcagtataaagacgcatttaggaatttttcaatcagctcttgtctagatcttctttggaaagtcttcttagttactggcaggtcaaaataccagctacttgatctaatagtgttatcagcaagaaactaaaaatcatgaagcaatgcagactttttgaatcagataggacttactaggccatcttgtgattctaatctaacatcttatctggccactttttctgccttgtgcaggaagtgaggtctggataggtcaaagggcatgactagagcattggagttaatgggaatggggaatgccttctttgcttcttgacatttctcctccacaacactgcacatcccttgtgaaataatttactattttttagacatcatgtcaaagactgaagtgaaagccaccctcttgtgatcaactgaggtcagaagttggcaaatttttttgttgggggtggggggctaaagggccagataataaatatttttggcttttcacaccagaaagatctccattgccactagtcaattctgcatttataactgagaagcaaccacagacaataagtaaagaagtgggcagcactgtatccagtataatattatttacaaaaggcaaagagggctggatttggcttcccaatctctgccttaggcctttaaagatatagcttccctggggaaatctctacactttgagatttatactccagtactaataacatagtaagagaatagtaatggtggtggtaataatagcagtagtggcatcagcagcaacaacaatggcaccttttaacatttgcttaatacgttaaggtttacaaagtctttttacaattatcatctcacataaaccttttaaattcctactcaagaactacacaagcaagggaaacgtgctagctgagcagtgtggtacaatgaaaagagaatgggatatactgcatttagtcatagagattggtggtgtgggatgaaaatgcctagagagtaggtgtgtgtctcctggccccattaggggacagttcattcagcagcagggtgagtgtcggagttcccaaatacatggctgctaatcagttccctcactctgtaggcattttgcatttaaagctgtccagaaaagagaggcttggtctaagaggttgtggtgtaagaaaatctctacatttccacccattgccttttgggatccctgtatgttagtgagcaacagtaaaaagtgacctgtgttaaaaaggtaatggaagcatggtacaattttagagttcatttgagcaaacagagattcatgaattgggcagctccaaaccagaagtggtatggggattccaatgaagaagtatgagaactaagctattataaagagaatgcagacctaatacaaataaaatatttgattgattacagttataaagctgtctttgctgggaaattcctagttatgtaattataagtgtgattggttgagcttaagttctgtttgtcattattataggcatttacaagaaatagctcaagttaagttctgctgatgtttgcaattcaagcaagtctaaggccacttatgaggcctaactggctctgtctgctcaggaattcttgcaccattgaagcattcttcaaggtctccattttaatttagtttaacacctcttaacaccacgccttcaataacatttatttaacacaggtctttgcttcgtgctaaaggcaaacatgtatatgagactctgtccctaaagcatctgtaactctccaaagacatacccctaggaacatcctgaagattctgaatcttgcagcctgccagaagcacagcagtgctgttggcatctctagaccactgtctgtgattgacttctggctctgctacttgtcagctatgtaaccttgggcaagtttctttttctagtctctttgtcatgttcttcatctgtaaaatgggtattttttaaactacccatttatgtagtctgtgatgatttaagagctaatatggtatgtgtagtggttatttatgagctaatatgtgtatattagcttaatgcctagcattcgtaaatactcagataaatgccagtcattattattatcataattgctggtgaaattaacatacaaagtcctgtgcaaaccttaattttctcactatggacttcatacattttcagaatcctagctacttggttctcagaacattcttctaacacctagagattccacagccaatgtatctttgggaacttattgactaacacagagctaaatgaagtaagcagcatttgtaccctgacattttacagatggaaggaatcatagaggtcatctcagccagaaacacattttcaagatagggaactgaggttcatagaaagtaaatgactttgccaaagtaatacactcaggacagaatgagggctagaaccccggggattagtttttttcctctggcctcaaaactcttccttctgccatttttaacttaccaatttcacctaataccttccacatatttttgtgactgtttcaaagattccactagctaccatagaagaagtaatgaactaaccttataattccatcccagtggcttcacctcacctgccctcagtttcctcacctgtccagtgaggcaaacttacattggaagatccctaaggtggttcccagttcagataagatacaatcctaacaaataaagtggggtcggagtggaatgttcttgaaatcctggtatcaatgggactgggatattactctaaatctatggaaacttcaagaacaatatatttgttttaacctgaaaagacagttgcgttccagtgtgaaatagccaccaggctggatgaaaatgtgtgatgtgattccatcattgaaatgagcatgtgttgaccgtaagttcttctctttctctctggggacatttgcagtgctgcagagcttctctgtgagctgggatgctctgtcagcttaaatcctttccagagtgataaatatacattgattttatttgatttggcccataggtgggggataaaaaacaagacatcacagccacactatactgtatattcattccccctgaagacaacgcacacatccttgttgaagtctcctcatttagacaactcttcctttttatgcttcattataatgccactttcatgtcccttcccctcaacatcgtgcaccttgttccacatccagcactctgtgtttttaaattaagggaaatgccatttaaatatggtttttctctttgtaatatactcacctataaaaagtctttaaaggtaatgctaactgctttggcagaaattcaggcatatatatagttattttaatacaaggctatttgtttgcttgactgtttttaatgactactcattaacaccatgatcttatcctcatttcctctgcacagagcttgagaggtgctgttcacagcccctgctgcctgctttctgaggtctccaagatgctagctttctacttttccactcagccctgacacctagttcatcatttgagataagccccagttgtcggcaaattgcaatctcatcaggtctgcaagatagcatcttgtttgactcttttcaacaccttccattaacactttgggactaggtctttgggaagagccaggcctcaccacatgggcgattgtggttgatgaacagattctagttttccccattattgacttcattaaacttgacagcctttttagtctccagatagggtgaaccttttttcactgacccttattaagagctgtctccttaagaagggtcattcgagaagggatagtgggggccactccttctacttccaggaaatagctgattttggtaaacaactttgatttagtttttagagttctttcacctccctaattaggacagccacaatttatcaaatgttagcaatgcaccaaagcctaagaatgatcttatttcttcctccttattcatgggttttattactactatcctaatttcctcatatggaaatgagcctcaaaaacattaaataagttactctaggtcccatatcaataaattgacagagctggaattggaatcaacttaagtctgacttcagagcttaaggttttaaccatcatattctaccaccttcataatacctttagttactttattatattttaggtttaccccttgttattggtcttcaaaatccatgagttcattctgattttatgaggtgtattggtaatctattgtttcatgaaaacttaccccaaaacttagcagattaaagcaataaacacctattatctcattcaggctttgtgggtcaaaaattcaggagcagcctagctgggctcagggtctcttatgaaattgtagtcaagatattggcccaggctgcagtcagtcacctgaagccttgactgggctggaagatgtacttccaagtttcactcacatgcctggcaagttactactcattattggtagaaggctttcgttctccagcaatgtctgatcctaattttattttaccatagattagtgcagtcttcacatgaggtttcatttcacctctctttctctctctctctctttctctctttctttattttttttctctctctctctcttttcccctggcagtcttcttttggtcaagccatttgtattagtttgctaggtttgccatatgaaagtaccagtggcttaaacaacagaaatttattacagttgtggaaactaaaagtccgagatcaaggtgtcatggagcattgttttctctgaggcctctgtctttggtttataaatggtgatcttgtctctctgtcttcacatggactttcttctgtctctgtgtcctaatcacctcttcatataaggatactagtcatgattgaggctcatgcatctgagctcattttcacttactcacctctttaaaggccctgtcttctaatacagtcacattctgaggggtgttaggacttagggggttaggacttcaacatatgaatgttgaaatgaagtaatttggctcataataccatctttgtcctttgtatgtcttgagaatttccttttacactgtcttacctattacttatgtcatttctccattcttaacctctctttgcctcaagttcccaaagctattgtgcagccaactttaagagttaactgcctgcctttctgattgctcgttacacttgaaggacttaggatgctatacctgaaggtcttagagagttagactggtcctccaagcttatgaattttctagaaactttttaacttgcatatggtattctcctgaagaagctgtggctaaagtcagatatatttttataaactattctttgatcatgtatgagtgccaaaaaaaggagtctttaattactttgagggaggggtctgtgcatctttcttaacccttttcctggctgccctgtagatattccagaaagatttgatgtcttgtggaatggtctgagaaccagatggaagctagatgaagaacaaaatcaaaagtgtctctcttgtcttgcatgatagaaactaatatcactaagaacgcaattgagagcaaattattaagaatatgcactgaatgtgtacaacagccagtgtttgttcctcatcagcacagggaagcattcttttttttttttttttttgtgagtaattttattttattttattttatttttttttattttatttatttatttatttatttattttttaattttttttttattatactctaagttttagggtacatgtgcacattgtgcaggttagttacatatgtatacatgtgccatgctggtgcgctgcacccactaacgtgtcatctagcattaggtatatctcccaatgctatccctcccccctcccccgaccccaccacagtccccagagtgtgatattccccttcctgtgtccatgtgatctcattgttcaattcccacctatgagtgagaatatgcggtgtttggttttttgttcttgcgatagtttactgagaatgatggtttccaatttcatccatgtccctacaaaggacatgaactcatcattttttatggctgcatagtattccatggtgtatatgtgccacattttcttaatccagtctatcattgttggacatttgggttggttccaagtctttgctattgtgaatagtgccgcaataaacatacgtgtgcatgtggctttatagcagcatgatttatagtcctttgggtatatacccagtaatgggatggctgggtcaaatggtatttctagttctagatccctgaggaatcgccacactgacttccacaatggttgaactagtttacagtcccaccaacagtgtaaaagtgttcctatttctccacatcctctccagcacctgttgtttcctgactttttaatgattgccattctaactggtgtgagatgatatctcatagtggttttgatttgcatttctctgatggccattgatgatgagcatttcttcatgtgttttttggctgcataaatgtcttcttttgagaagtgtctgttcatgtccttcacccactttttgatggggttgtttgattttttcttgtaaatttgtttgagttcattgtagattctggatattagccctttgtcagatgagtaggttgtgaaaattttctcccatgttgtaggttgcctgttcactctgatggtagtttcttttgctgtgcagaagctctttagtttaattagatcccatttgtcaattttggcttttgttgccattgcttttggtgttttggacatgaagtccttgcccacgcctatgtcctgaatggtaatgcctaggttttcttctaaggtttttatggttttaggtctaacgtttaaatctttaatccatcttgaattgatttttgtataaggtgtaaggaagggatccagtttcagctttctacatatggctagccagttttcccagcaccatttgttaaatagggaatcctttccccattgcttgtttttctcaggtttgtcaaagatcagatagttgtagatatgtggcattatttctgagggctctgttctgttccattgatctatatctctgttttggtatcagtaccatgctgttttggttactgtagccttgtagtatagtttgaagtcaggtagtgtgatgcctccagctttgttcttttggcttaggattgacttggcgatgcgggctcttttttggttccatatgaactttaaagtagttttttccaattctgtgaagaaagtcattggtagcttgatggggatggcattgaatctgtaaattaccttgggcagtatggccattttcacgatattgattcttcctacccatgagcatggaatgttcttccatttgtttgtgtcctcttttatttccttgagcagtggtttgtagttctccttgaagaggtccttcacatcccttgtaagttggattcctaggtattttattctctttgaagcaattgtgaatgggagttcactcatgatttggctctctgtttgtctgttattggtgtataagaatgcttgtgatttttgtacattgattttgtatcctgagactttgctgaagttgcttatcagctgaaggagattttgggctgagacgatggggttttctagataaacaatcatgtcgtctgcaaacagggacaatttgacttcctcttttcctaattgaataccctttatttccttctcctgcctgattgccctggccagaacttccaacactatgttgaataggagcggtgacagagggcatccctgtcttgtaccagttttcaaagggaatgcttccagtttttgcccattcagtatgatattggctgtgggtttgtcatagatagctcttattattttgaaatacgtcccatcaatacctaatttattgagagtttttagcatgaagggttgttgaattttgtcaaaggctttttctgcatctattgagataatcatgtggtttttgtctttggctctgtttatatgctggattacatttattgatttgcgtatattgaaccagccttgcatcccagggatgaagcccacttgatcatggtggataagctttttgatgtgctgctggattcggtttgccagtattttattgaggatttttgcatcaatgttcatcaaggatattggtctaaaattctcttttttggttgtgtctctgcccggctttggtatcagaatgatgctggcctcataaaatgagttagggaggattccctctttttctattgattggaatagtttcagaaggaatggtaccagttcctccttgtacctctggtagaattcggctgtgaatccatctggtcctggactctttttggttggtaaactattgattattgccacaatttcagagcctgatattggtctcttcagaaattcaacttcttcctggtttagtcttgggagagtgtatgtgtcgaggaatgtatccatttcttctagattttctagtttatttgcgtagaggtgtttgtagtattctctgatggtagtttgtatttctgtgggatcggtggtgatatcccctttatcattttttattgtgtctatttgattcttctctctttttttctttattagtcttgctagcggtctatcaattttgttgatcctttcaaaaaaccagctcctggattcattgattttttgaagggttttttgtgtctctatttccttcagttctgctctgattttagttatttcttgccttctgctagcttttgaatgtgtttgctcttgcttttctagttcttttaattgtgatgttagggtgtcaattttggatctttcctgctttctcttgtaggcatttagtgctataaatttccctctacacactgctttgaatgtgtcccagagattctggtatgtggtgtctttgttctcgttggtttcaaagaacatctttatttctgccttcatttcgttatgtacccagtagtcattcaggagcaggttgttcagtttccatgtagttgagcggctttgagtgagattcttaatcctgagttctagtttgattgcactgtggtctgagagatagtttgttataatctctgttcttttacatttgctgaggagagctttacttccaactatgtggtcaattttggaataggtgtggtgtggtgctgaaaaaaatgtatattctgttgatttggggtggtgagttctgtagatgtctattaggtctgcttggtgcagagctgagttcaattcctgggtatccttgttgactttctgtctcgttgatctgtctaatgttgacagtggggtgttaaagtctcccattattaatgtgtgggagtctaagtctctttgttggtcactcaggacttgctttatgaatctgggtgctcctgtattgggtgcataaatatttaggatagttagctcctcttgttgaattgatccctttaccattatgtaatggccttctttgtctcttttgatctttgttggtttaaagtctgttttatcagagactaggattgcaacccctgcctttttttgttttccattggcttggtagatcttcctccatccttttattttgagcctatgtgtgtctctgcacgtgagatgggtttcctgaatacagcacactgatgggtcttgactctttatccaacttgccagtctgtgtcttttaattgcagaatttagtccatttatatttaaagttaatattgttatgtgtgaatttgatcctgtcattatgatgttagctggtgattttgctcattagttgatgcagtttcttcctagtctcgatggtctttacattttggcatgattttgcagcggctggtaccggttgttcctttccatgtttagtgcttccttcaggagctcttttagggcaggcctggtggtgacaaaatctctcagcatttgcttgtctataaagtattttatttctccttcacttatgaagcttagtttggctggatatgaaattctgggttgaaaattcttttctttaagaatgttgaatattggcccccactctcttctggcttgtagggtttctgccgagagatccgctgttagtctgatgggctttcctttgagggtaacccgacctttctctctggctgcccttaacattttttccttcatttcaactttggtgaatctgacaattatgtgtcttggagttgctcttctcgaggagtatctttgtggcgttctctgtatttcctgaatctgaacgttggcctgccttgctagattggggaagttttcctggataatatcctgcagagtgttttccaacttggttccattctccacatcactttcaggtacaccaatcagatgtagatttggtcttttcacatagtcccatatttcttggaggctttgctcatttctttttattcttttttctctaaacttcccttctcgcttcatttcattcatttcatcttccattgctgataccctttcttccagttgatcgcatcggctcctgaggcttctgcattcttcacgtagttctggagccttggttttcagctccatcagctcctttaagcacttctctgtattggttattctagttatacattcttctaaatttttttcaaagttttcaacttctttgcctttggtttgaatgtcctcccgtagctcagagtaatttgatcgtctgaagccttcttctctcagctcgtcaaaatcattctccatccagctttgttctgttgctggtgaggaactgcgttcctttggaggaggagaggcgctctgcgttttagagtttccagtttttctgttctgttttttccccatctttgccaagatggccgaataggaacagctccggtctacagctcccagcgtgagcgacgcagaagacgggtgatttctgcatttccatctgaggtaccgggttcatctcactagggagtgccagacagtgggcgcaggccagtgtgtgcgcgcaccgtgcgcgagccgaagcagggcgaggcattgcctcacctgggaagcgcaaggggtcagggagttccctttccgagtcaaagaaaggggtgacggacgcacctggaaaatcgggtcactcccacccgaatattgcgcttttcagaccggcttaagaaacggcgcaccacgagactatatcccacacctggctcagagggtcctacgcccacggaatctcgctgattgctagcacagcagtctgagatcaaactgcaaggcggcaacgaggctgggggaggggcgcccgccattgcccaggcttgcttaggtaaacaaagcagccgggaagctcgaactgggtggagcccaccacagctcaaggaggcctgcctgcctctgtaggctccacctctgggggcagggcacagacaaacaaaaagacagcagtaacctctgcagacttaagtgtccctgtctgacagctttgaagagagcagtggttctcccagcacgcagctggagatctgaggacgggcagactgcctcctcaagtgggtccctgacccctgacccccaagcagcctaactgggaggcaccccccagcaggggtacactgacacctcacacggcagggtattccaacagacctgcagctgagggtcctgtctgttagaaggaaaactaacaaccagaaaggacatctacactgaaaacccatctgtacatcaccatcatcaaagaccaaaagtagcacagggaagcattctaagcttttgccaggacgcctgcttattatatgctatggtctgtccaaatcttctgtggctgccactacagcctgatttcccttggaaacttggcagcccgtgagttacgatggaattcccaggtgataatgtatctaatttccctcattgtacttcttttatcctgtaatgtgctgttgattcccacggctgagctgtgatggagaatagccattattattgtaatggcattattcagtccattaagacttaaaacatacctggtaaaaatagtgaaagcttacaagtcttcatagcaatctcaaagactaataacttagttgttagtcttttcctcaagtaaactttgacaggtgtttgggaataattctttcctgggctgatagtatttgatttgtactatatattgttctaagtaaatgcaggaccaatgctccatcctattcgaaaaaagaaaaggggtctctgtagagaaactattaaaaaagtttaaacagcctttacagaaacgtggtttggtggcaaagaaagggaaaccaccaccccttccaaagctcaccaggagaaaagtgagaaataaaatatcaaaatgaaattgactccacacaaagatatctgatcaccagacaaaacaagtaccaaagtgcagaaaaatattacaataaataacatcagattctttattcaagccaggcaaaacttatgtagtttttcctaaccaggttaattattttcctcatcttcttttcctttaatataaaaaagggatataagaaagcaagcctgagtatattcttggttgctctgtttcttgtgttagcctagccagaacgagctacaatagaaagaagttatactttagaaaacaatctatttaatataattcaatgctacacaaagctttatttcttaatatggacaattatttgctactggaaagaaagcagagcgagatatggccctttggggagatggttaaataagaaatacatttccagatgatgtcacatgtaaatagcactccgaaatcactaggcatcaaaattaatcaggctgaatccattgctttgtaaggtgtaaatcgctagccttacttaaccttacttcagtgctgggactcccgaatcgcgaggaaggtatgattcttatttcttcacacacacacagactgagtgttctcaagacaggaacatgattgagaatgctggaaaaaacattacattaatctacattgtaagagtaccatgcaaacatttgcttgtttccaacaccttgtaaatgtatctcgttgttgactcaaaatgaacatttggtgcagatactgagaaaaaagaatgtacttagaacagggatttcattacttctcttataggtctcagctgtggagattgtttagccaacaagaaacccaatctctgttaggtatcttgtctgagatgatattaaaaatattcaacaaccagtaggaaatggaaccaatgaaaatgactcaggtcccctgctgagactggcattgacctgttagttgttgaattgtggaaagaggggaaagggaccggatgatcggtggtaagggtatgtttgaagcagtgacattcatcatctatttatgcaagtattttaacattttaataattgatacagttatctgggtgcatgccagttgacaacttgccctgcatattgataattttaccatgcagactccactcctcaggtaactcttgttctattacactggactttatcatcatgtaatctgtcctgtccctctctctctctctctctctctctctctctctctattgaattctgggggtgtagtagtccattgtttagagggaatttagaagttttcctatattaggaagtgtattcatttcctaggaatgccataacaaagaattacaaactgagaggcttacaacaatacaaagttatcatatcatggctctggaggtgaaaagtctgaaataaaagtgttggtggggctggacacggtggctcacacctgtaatcccagcactttgggaggctgaggcaggcagatcacttgaggtcaggagttcgagaccagcctggctgacgtggtgaaaccctgtctttactaaaagtacaaaaaattagctgggcgtggtggtgggtgcctgtaatcccagctactgaggaggctgaggcaggataattgcttgaacccgggaggtggaggttgcagtgagctgagatcgtgccactgcactccagcctgggtgacaagagcgaggctacttctcaaaaaagaaaaaaaaagtgttggcggggccaagatctctctggaggctctcagggaggatccttccttgcctctttctaacctcttttgatttgctgacaatctttggcattctttggtttgcagctgcagcactttgatcacggccttgttgtcacatggcattctcacctttagtgcctgtgtgtcttcccctcttcacataaggatgcaagtcatattggatgacttatcctactatcctactatgtctatcctactccaatatgaccttatcttagctgattacatctgtagtgaccctatttccaaataaggtcacactccgaggtactggggggttaggatttcatcatatcttttgggagagacacaattcaactcaggacaggaaggaaaagccccggcaaccgaattgtattgttctgctagatgatgacaagtcataatgtagagaagttgctccaaagtgggatacatacattggagggcagcatagaatgaaagttttagaacatctatttatatttattttaatcgtattcctttatatttttgttatagtctgtttcatagcacatttagtgtataaatataataatacatgtctacgtgttaaaaatgaatgaaaatacctacattgggagtgggctgaatccacagaaagttttactgatggtggttcagggaatgtaagcaaaaggatttcaaaccaatgtaagagcatgaaatattaatgacatgtttcagataaaaatctctgtgtaggtttttcatagccccaattcaagttagactgggcaagaaatgagattatttaggcaaaaaaagggaggagcactaaattcatccacaattttaaaagtatcttctttcaggaggcttttggacagtaacatttccaaaaaaatatagtgttttatgccacagagaatcaagttgcattgtgtatactaaatggtcaagcattttcaagaacatgacaaaataaaaacatacaaatttatatctcaaaaggaaagtatcttctttcatgtcagatcatcagcacagaagccctcgatgcatgcaaaggcaagcacaggctctgcagatgagatgtgaagaagcaattagggaaggaaggaagggacagtttggatgctgggtcctgacccagaaacaacacggagtagatctcggatttgctttttcttaggtccaatgctaggacgattactttatctgtggtgaggaatgttataaaaaaccattgttggaatgccaccaaaatacttctttcccttttagcatcatcaccaagattctagaacgaagtaataacagttgccaaccttgagccattctccagctgttgtcatgtttcagtcagacaggaagtgttggcgagtaatatgggatttattgggagtgttcctttacgtgagtccaggaaataagaactagagatgagcttgggtgcctctgcttcttttatttctatggaacattctttggggtcagttttgaataatcactgggcattatcggatttctatcactattttttgcatgttcttgtgattattcaccagggaacattttataatactcatattaaatttttatttcttaatttcttgcctcattactcccatttgcattggctgcagactctctaagtattactttcccttccttgtggttcataccctaatcattgaatattgatgttctatttatttctatgcactcactttgtttttgaccaagttatatagttatttggttttcaggtaatgctttcttacagttactcaagaatgtatgctagaaaatgttgcccataactgcttaaacataaaagaggatatgttttcttgttttccatctatgttacagtctgtttctgaaatatcctttattatgagtagaataaaatctactggacttggaatccacattcccttttaaattaaaagtattcccagactttcaaattttacattccttagcatgatctcttctctataaagacagaagaggggacagaaaattctgactgatcatttcttgagctagaagcagctataatattcctgttctccatcctttataattactttctcataaatactaaactacacccccctgagcatctagaagatttaaacactgatcaaaggcaggtttagctgtatcctcaggacaagctgattcaatgaagaaaagctcaggctcttggagagcttttagaaagagaaataaattaacaattagcatttaacagcagtaaaaactgcttagcggaagcagacttgatgttttaggggatttgagatattcggagtgatgagatgaataggaaaaactgtgttccaattaggaagacagagtgaaaaggtgtgagatgtggtcttctagttcattccactggtgatatagagcctttcctggacagatttttatcttttttgagtaattattatccacgttataatttcatgcctgttgcttttaggtaagctcagaattatagtcatggcttgagtaaagatctcattgcagttgagtactagcagtaccactactcttgcatgagttgcattctctcttgaccagctctgttaatgggtgtccttatgtatgaaactgattttcttactaatggcaggattctgtctggttaggatattccctgaaatgcccaagggtgtattttgcttaaaagcaaggctggccagagaggtttggtttatgtatttatttttaaatttcttttgtacctaggataataaatatattcctctagtcttggataataatataaaattacagccatactgacaaaattaaagaagacattaacaaaaaattcagattaaaatataaagttcatgtctttggcaagtacacacaggattgtggttttgcccaaggtgtctaattaattactataatttttcaattccctgtgttcaataaaaacacgtctatgaaatgctattcataaaagcagaactcactggtcattaaacatgcaaatatccacgaataaatacacaattctctcttgcaggaaatgctatcagtagactaaataagtggtggacatttttctacagtaagtatttacttttcctacagtttgatcttaaaataccacagttggccagggcctcatgtgttgctggtgcaatctccgcattgttaatgggtatatgaagctcatgatgatgtccacaagatgataccgctattggaaaacttcctcattcttcctgtctaaccagtagcataatggatatgtgaatagtgcctgttttgtacattttccctcaggtaaactgtgataggcctttgggaataattcttttcaaggcctgaagcatttaaagtgcactgtatattgttctaaatgcaagaccaatgccccattctatcagagaaaagaaaaagggtatctgtgggaaactatttaaaagattaaaggagctttgactgaaatgtggtttggtggcaaagaaagggaaaccaccatcccttggtacagtattaaggctatatctgggaaaaccaacaaaacgtgtcatatgtggatagatcatgacactgacaccattagcaaggactttttttttttttttaacagcatttcttgtgctagtttcccagtgccaagaatggcttctttatttattcttgaactccaatacctatcacagtacttggtccttacttggtactcaataaatgtttgttgaatgaatctattttttatacttttgtatcaaactatcacatctgagcgattttgtaattttattcagctgatgatattctttataccagtgcaattttccatatgctcatgtgtgttttatttctcatgatatcagtttttctttctttgaactttgtagttccctgaattgcttagtattgtttatatatgactaaaggcccaggtggataagatggtatctttctttgtttattgtttatatatgactaaaggtccagtgaaaggtaaaaaatgagtttgttagatttcaaaatcagtcaaaaggtaaaatcagtgtgaagataagataccatcttatctaactggacctttagtccagtgaaaggtgaaaaatgagtttgttagatttcaaaatcagtcctaactaaaaaccatttcccctactggatgttgtaactcacatcattacaatttatggcttaatgaaacatttatttttctgaacaacttggatttcagtgagcagatttcttaaaataaggacattctatttttcattatagtactaagaatgctggaacaaatattttttctacttacatacttgagttcagttgaattattttatcaggtatttgcaagatgacctggaatatcttggaagttattatatgtaaattatacatacacatatatgtgtatagttcctggcattgggcaactagtataaggaatgctgcaaaaaaaatccttgctaatggtttcagcatcatgatatatatatacatatatatgcatatgtgtaattacacatatctatatgtataaataactatattaatatacttatataagctactacatattaataaatgatcaacatacctatattatttatatataaactatatataaatataactatatatatacacacacacacatatatatatgtagttgtagaaagggtcttttttagtgaattaagacttcatgaaaggccagttatagtggctcatcatgcctgtaatcccagcattctgggaggctagaggatcacttgagcctagtagttcaagatcagcctgggcaacacagcaagatcccatcttaaaataaaaaagatctcatggtaactaatatttgatatgtatgatatatgactttaagcaatattacgtgacatcacctttctcacattctaggttgctgtttacattttttgttcagtaatgaaacaaactcacgaggaagtaaaccaatcaacattttatgcatggagttttctaaatccttcatgtggctttggtagcattttgattagaagcccttgaattctgtcctgagtgcttacccattatctagtgatttacagagtttacaggaggacaccgaaatcacaggcttgaccgcatttacggatggcacagataccagatccaaaaagtttttaatgatctggaaccatgaagtgaaataaacaaggagcccagatttcttgaagacctcctctatgccaggcattttatgtctctcaattctttgagagaacctatggcatgaagttattaatttttttctagatggcaaaactgaaaataaagtatattcaattaatttctcaaggtcatgggattgaaaatactgtgactgaaaaaaatattttaagtcttcctgatcctagagtctatcttcttacattaaaataaacatattaaataaataagcacaatcagtttaggaaagatttgttttgatagaaatccatgcaaagcaggtcagggaatttcagttgaccacagattcaatggggaacatcagctaatgagagaaatgtacagtgcaaattatttcattgtacttagtgctagtcaggcttaataaagggtatgatactttggcacctcattgctttcacaaacaagaaggcattctgagtaagaaaacatgaagacaaagatcctaaacctttatcttgtggatgacagctaagaatgctcaggtaagaaatgactgtagtgacggcaggggatggatgagggctataacatctgttgcaatacatacactgaatggtgactttttcttttttaaattgacacggggtctagctctgttgccctgccagagggcagtggcgcaatcatagctcactgcagccttgaactcctgggctcaggtgaccctcctgcctcagcctcccaagtagcttggactgcaggtgcatgcaaccatgccccactaatttttttatatatttatttttagtagcaacaagctctcactatgttgcccaggatggtcttgaacttctgggctcaagtaatcctcttgtcttagtcttccaaagtgctggcattacaggcatgagccaccatgcctgccctaatggtgtttttaaaggaggaattagctgtggtcagtacagatttatttggaagaaatggaatctgtgcttagaagccaaaaggcccattattattcaataaaaggaagctctttagaacactttgaacctgaaagagttaatgaagcatgagacattagggttcccatatttagtttagatctatgtggcactatttttagaaggttacattgtttttaatattttatatagtaggccgggcgtggtggctcacgcctgtaatcccagcactttgggaggccgaggcaggcagatcacaaggccaagagatcgagaccatcctggccaatgtggtgaaaccccatctctactaaaaaatacaaaacgtagccgggcgtggcggtgtgcgcctgtaatcccagctacttgggaggctgaggcaggagaatcacttgaaccaggaggcagaggttgcagtgagcctagattgcgccactgcactacagcctgggcaacagagtgagacttcatctcaaaaaaaaaaaattatatagtataattctaataatgggatgctccacttcacttgcaagtacttgcatatggaggtgtttttttccccagtatgaggagagatcaacagtaaatacctatattatttctattgctggtcaatgcagaaaatatttgttaagcacgaagagtgtggatgtgtttgatgactacagaactaaggatttctcaaagaaacaaagagagaagtctaagttcaggtgtggaagcccttgcctaatttgcttcttcacttttgcccagaaataatttggccagggattgtgttactattgttgaattaaaccagacagaatcaggcctataagaagagccgtttagtaaaggaaatgattctgtgaaaattttagatttgataactgacatgggaggtgtttaccttcttttgaaaagcagatttaaaaaattgaattaaatatacacacagacttttacactcattttcagggaagcaagaactctatcataataatcaccaaatatcaattaatcagaaggaaaaataggcttgcaggaagagaaaatcagttcctttagacaaatggtattgacatagagattccaggtatgtttagttatataccatgcattctggatcaaatagagaggcttgtgacttgtatcagtattacctggcttcacagcagcaggagcagagaaaatatgcactatgtttagagatgaattaggagagtatgtctgaaagaaccagggatgcgtgggcaggtagatttggtcaggcatatttataataatgagccattggatttgggattgggtggagggaataaagtcagaaaaccattgggtcatcttccctaataaaagagaacgtctgtggagttataaatagaattgcctaatatttcatctaatagctttattcaatcattagaacctaagctttcttgtatcaatgtaaagtatgtgtgtgtatatatgtatatatattcatatgtgtgtgtattatatgcatatgtgcatatacatgtgtgtaatgaaaaaagaaaacagccctgaagaatcctcaagaaactgtcagacgtccttgtcctttaaaagctccagttgcccttcttgtctaaacacatcagtgcagtgtgaatcctgcattattcatgaacacataaggtctgtatttgtatacatttatctcttggctatttatttctataatctctgccccaaaccctcgccatgctttgtctttctcttttcctacttttcttttttttctggtagtttgaaaaataaacattagaaatagctattttattgcttacttctttcctttaacatatggcatttgcttaacctcttggagagttgtggttttctgaccctggagttctgatgggaaagataatgagaagtgtttacttagcatctaggccagcaagctaagaaaaacattgtgccatgctagtattgacaaggtgacagagagcccacacttgcctcacatgttggccactcccgatgctacatcccactttactcttgctggaggactgacattaatgcttactgttttgaggtctggacataatcctggtagattctaaaactcctagcaaacagtggtagacaagtcaagggtctataattgcgtataaacagaaaagtaaagacttacatatttaagcaacctgctaatccccatggtcatttagttccctagtggctatttttaatttgtcttgtttttagaggcactctgaaagcatgaggcaggtgaaagcgtgtctgtgtgttgcttgcatgcacatgctttttcaagaaggtcttcttcttttcttgtcaagactgcagctgtcaactgttccccaaaggtgttgcctagaatcagcatgcagcgctgtaggcaacctgtcacttagatgagacaccttgtatatatgctgtagttcactctctgacttgcctgtgtgcacaatgccatcttgtctgttagaagacagggccatcgtgagatgcagtttctctttgagatatatagtagctcttctttcttcaaaaggaaaaaataaaaaataaaaaaaagctactcttgctggaaaggtagagagaagggtctgcgggtgccctctaccattgtggtttcaatgtctaaatcttctggagaggattgctgcagtgatgagataaaagcagctgcctttccaagtactgtctatttgcattgatatttacattctttgccaaagtgacatcattaacatttgcttagtatttgtgccacagggatatgttttacataatttaagacttggaagtgatgataatgtatttcagatgggcagtagaggccacagagtgctgaatttcatcccctttcttcttaaggaccttagtgcataaataagtccctagtccgtatccctaaatcatattaacaatactgcttactgggtgccaacaatatgtctggtactggactagatatatgtgtatatattgtttagcccccatgacaacagtatgagggtaggtaccattatctccattatatagtaaagaagcaaggctagaaaaattggtgacttgcacaggtctgaattcagagacatctcaccgcaaggacttttctccttatgctgtgtcattctatctcccatcttgtagcctacttgtttcttcagatttaagaaacagaaaccctatattttctcaggacatgacacttgaaataacaagaaagaatattgtgggactctgaccttggtccgtttctgtctctttcattctcatctttactctaggtgcccagaaactcttctttgaaataaatataaaagatctgtgtttgctttgagagaaagccacataacattgtcacaagccagattattgaactctgccagatggcccttatttaccaaatatatgttttagttttatatacgaacagaggttttaaaaagataaagacgaacaaaattgtgtttaatgtcctgtatgataccttttgccttatttacaaactggtcctctctctgactgtacctgctcctgatgccccatcctcaatgtcctccatcagcataaaaaatgtgaaacctctttttcaaaaacaaatttaaaaaaaagtgctcagtctctcatcttgagatggagaattagaagcaaatttgcccttgcttttcttcttaatcttccttcttcccaccttctttccctcgctcccttctttcttctttctttcacaccatgtgccccagaatgacagctcagggaaagtaggcattataagctgagtagccttttccttgatgtcccttgaagggctccttatgttcagagaatatatcactgcatttgcagctcccccagaaatgccgtagcttggaggagcctattactcacttgaatctctttggtgtagacctataaatagattctcgtcttttccttgtaaccccctatagattcttgattcaagggtcaaaaatggagagatgagagttcaatcttcttggaacttactgacaccctagctcccttttaagaacttgtcctccttactaacaccatctacatggccatctgggtcttctcagctcagaaacaccctgcaacaatggctggcggaaataaggggagggcccatttgaattagcacattcccccacaagcacacacatccatactgccaggcctctgtttgtccagtttcctcctcttgtgctgttcttcccacccttctcctcagtgcagttcagatatcatctgtgtcccatgaagtctactctctcccaggggaaaccctttgaatttccattgcatattattctgtgcttctttttatgattaatcccatttaccttgtattatataaatatattttggtccttattagattatatatacttggaggaggacagtatctttctttggtccattggtgtggctaccacaggctcacagcatggcatttggttgcctaaaatgatatgtcttatccgttctttgatgtacagataagaaaagcctttatttagtttggctttcattttgttcaagaacagtggcacagtttggtttttcttgatatctttcccttattcatggttgcttttctcaaacagcacatgtggggcttaatacctagatgatgggttgataggtgcagcaaaccaggtggtacagggtcctgtgtgactctaccatggtgcacatttacctgtgtaacaaacctgcacatcctgcacatgtatcctgaaacttaaaatttaacagaaaaggaaaaagaaaaagaaattattataaatgtaaagtaattaaaagtatattatttaggagggacagtagatatcacaaaggtaagcatgtttcattctcaaatgaaatacacaaatttataaaagtgaattcagcaccagtggtgaatataaaaggctgttaaggaggaggagctaaagttttgattggaacttgaagaaaaggtatgttgttataggcagaaaacttgccatgcaggtgatcatgttagaatcagtgtcagacattaacaaaacattttcagtcaagggcagagagtaaatattttaggctttttggaggctgattacataatttgcacaatgaaatagtgggtccctttttcaaaaagcaataacgaagtgccatgagaagtacttaaaacataaagctctttttcctttttccatggtttctctctctaaacttgtcatgttgttttatatttgctcttcagtgtcattctaaggaaagaaaatgttaaattattagcatgaattttgccattcatctttatattatgccatgccagtcttaaataagttctgaataagaacttctaattcatttgcagaattactgacataggaaacatttcttatttcatagctcatgcagtgcatatatgttttgttcttaccagaaaactggacacactgcacagattaactcacctgtttttatttatttcacttcttgatatacacatattcaacaaacactctcttcctttggcttcctaatgagtaagaaaagactgaaaagaaaagaaactgagttgctttttcttttcttttccttctttgacataattttcagctgaggtggttggtcaattcatggaagtaacatgagtaagaaaggctataattaggttccttagtcatttatgtttcttagaatgccatcgttttctttctgtgttcaaagcaagttttggttccaatggaaaacatgttctttaaggactgtcagcatcccagcttactcagagtagatgtgagagactttgcaatcgctttgagtctcattgagtgtgcatcctaagtctaccagaatcttctactcccggggtattgtgagagctatagggggtgaagtggcaagaaacaatgggcatgtgtatagtatatccatatgtttatgcatctctcttttgctactgcacatgcctaattgtttcattagacttcattcaaaaacacaaattcaaagataaaattattaagtgtttcaagacggagagacaggagaatattaaaccaagagcaggtggtacagggtcctgtgtgactctactggctgcatacccatgaagcttcacctgggttttgcaagccatatggtctctgtctcaagtatttagctgttgtaccatgaagtgcggctataaatgatatgtaaacaaatggacgtgactgtgttccagtaaaactttatttacaaaaaacaggtagcagccagaatctggtctgtgggccattgtttgttgatccctagttaggcaaaaacatggagatgagaatatgtgagccttgtttgagaattgcttagctagtgtgaggtaagtcagggaatttcagaagaaagccaattatgaaagcatggattggactgtttgaatattttcctctagttgataaagtgactgatggctttagctactgaattaacgtgatcaaaagagtttttttttttttttggagatggagtcttgctctgtcaccaagctggagtgcagtggcatgatcttggctcactgcaacctctgcatcctgggttcaagcaattctcctgcctcagctttccgagtagtgggaacacaccactacttccagctaatttttgtatttttagtagagatggggtttcatcatgttggccaggatgatcttgatctcttgacctcatgatctgcccgcctcggcctcccaaagtgctgggattacaggtgtgagccaccgtgcctcgcccatcaaaagagatttttagtgaattaatatggaagtgtcctatcacagagataggaaggggtggatctgttaatagacagatgaacaagggagctattgtgagagtccaggtatgagatgataacaacttggagtattaagaagggatttgcaatgatggaaatatttgattccagaggaattttaagtgaagtgtcaccaggatgtggagagtgatttgatgttggggctgagagaagaaaagatgggaaatttcaaggtcttgtgcccggaaggctgcaaaatggatagccattcattccctgaacctgtattgtgtgtatcttctgtttgctaaaataaccatgaacagaaatggctggtgggctgctgattttaggtggctgcagaattttggtctatttgagttgatgttgggttgcctaatacacatgatgcttacaaggcattcaagatgtgtcactggcatagaggagtggagtgagggatagaagtaaaggtaggtagcccatcttcacagaaaggtgaattagaccagcgacagcagataccatctcccaatggagaaagcatagagaagagaaagaaaaagaaagaggctctaataccctaatcacttacataccctagtgtagtcctctatgcttttcaaattaagtagatatttcactttcctgtttaaccttgcctggaaagattgagaggtccatgtctagtcacaatgttagaatgaaataaatgtgtgaaataaatcatgtttatagtgtagatccccttcatcttcatctttgagtcaaatgccaaagccatttgttggctcagtaacgtttcacttagaaaatgaaacttttattttggctaaacgagtatggtgtcctggtcctttcccaaaaacataccttcaattttaccctagctggctgattgactgtttcctttacagatgcagtctagggatgctaagggcaacatcctttgtgataatgaaagccttataatgtattttttccagtaacttaggatgctgtatattaagctgtatattggtaaatattttgtctatgtggagaaatgtaaatgagatttttttttcttttcatcattcttctctacaaatgtgcattgaaaagacactgaactttggtcccatgcttatgcacaaggtataaaagttgcttatattcctaacctctccacagagttgtctagattcacaggactatttggtcaaatgttctgcaattcagttccactgcttgactgtaattcacctataaacccagaaaaatactgctggagttcagaggccctgactgttattagacagagaaaacctatagcacactggaacaatcacatttaaaagatttgcctcaagctttctatggtcactattactctttaatttatgcttttaggtttcaactttgaaatgatattgaaattttcattatgggcaaccctgaatctggaaaaatccaaggcagcttttaggacagtcacctttaattacccaccaccgttaagattaggaagtaaatgctgaaattcccatgtaagtgtattttgcaagaaattttcacactatgaaataattggtctttatctctcatcctgtctgattctctatcaagacatatcaaacatgcacccctctgctcaaagtgtaaaaaaaaagtttgctttttaaagttttaattaaggcttttgctgtgtgtgtgtgtgtgtgtgtgtgtgtgtgtgaaagtactacacactttagttgtttaggtgtcattgttgagacatttagactgtatttcattcaggcagatacttttactttattacattcccaaatgaggaaatgtgctgattagatggaaaagcatgtgtgtatcttatagtgttagcaatttggcacggtttttgttttgttagctctcagcatggttgccttcaactatatttacaccacatgggtgggcatgtgttaaagatacaaaaatcctcagacctctgaattgcattcctgaaggagaccttaattctattaggttggtgcaaattaaaatgccgttacttgtaatggcaaaaaccgcaatgattttcgcaccaaccttatactgcttattgcttttgcctcttctgtaatgaaaggcttctaactggtttgcctgcctttgattttagctttttgtgtagccttggtcatatcaagtttctgctgaaaaatttggcatggcctttgatttcccagtctcatctcctacaactcaccagtatgcaccggtagttccagtccgcaatacgtcctgcgctgtcgagcttacgcacctttctgtgtgctgtttcctctgctaagaatgtctagtgaacttctactcaccgtttaagaccagatttaaatggcatcttccttacaaataagttgattgatctatcattttattgattctgtcattcagaaacattccttcaatgcatgctatgttctgggaaactttctctaaacggactcaaacatttcttcttctgggttttcccagcgctggatactctgagtcattactaatccacactgggttcttgttttctaggctgcatccctcaatagactgtgaggtctttgtgagaatacaattgcttttgtgtttagttccatattcacagcgttcattctagtgtctggaacatagggttccactacatgcactacacatttgttgactagaaaaatgattcgttttatcaagggactgtcttaggaaatactaagtggggtgcctttctgatacattgtaatgaccacccttttctctgttctctaacgttgtatcccaaagtagataaactagagttttatccttaccaaccatctttctctcatctccatcctactttcccagcactcccctgcacccccctgctgtgtgcaaagctccaatcccgggaaaataccatgcagcgctttcattctaaaggggagcaattgaaagcatttctttggtaatttaagcacacagcagctacctttgcaaaagcctggttgctaaattatcccctcaactactcattttgcaaaagggaaaagaaaaaaaaaacacactggggggatagagactctaataagaaaagagtctgtgttttctttaggttcagcctgattcctctccacctcctctcccttcagtgactgcaaggctcctggtgtggctcgttctgctacttttccttttaatgttttaaatgccacaaatgcttgtcataaaccaccttcttaattatgcagaagtggagctgaatggttagttagcagttctattgcaattactgcactttttcaggtctgctgctgttttatgtggcactgttttctaagttgctgattaagatgatgtagtgggtggagttcttcttcccaccattggagaagggccgctgaagcctgggataatgagtccttaggcaatagtttatggcctaataagagttaaggatgggagcaaggaggagatggagagttatgctcattcatttccttcttaaaaagaaaaagccctctggttttgttcaacttttgcttctcctttgtccagtgtagatgctgaaattgctagagaaatatccatgatggctcttagcagtcctaatcttatttggacctgatattctgaggcttttaggcatcttcagatatccttgtgcagtgaaagagccttgcattggagttgaaatgatgacgagaaaatttaagaactgttgagaatttgaatcaatctcttcatgttgccatctctctctctctctttttaaagccaaatatgaatactgctgtgtgccgatcttgagccctgagaagctgcacttccagtgtagttctaggtccccactgaaaataaaataatgtgaaattgaaagcagcatgctattgtaaagtagtgcaatcattcgttcattcacaggtacttactgaatgcctactatgtcctaggcactgtgtgaggcccaggggatggggctaaaaacaatataaacttcttgcctttatggaatggcattctagtcaggtatactgatattaaaccaatctggaaataaatatatactcttcaatggtgctatgaaaaaaataaagtagaatgaggtgctataaaaaaataaagtagaatgagggaatggagagtgtgctagggcatgctattttgggtggagaaggtttctttgtggcagtgacattgaaataagtgcctgaatgaggcaaagcaacaagatgtaaggatatccaagaagagcattccatgctgaggaaatagcaggtataatcaccctgaaacaggaatgcacttggcttattggagaaacagtgggaggctgatggctagaagacagtgagcccgcagggcaggacagggggtaaagtgaggtcaaagagataaccaggagcatattgtgtatggccttgtaggtgaacaaatgggctttgaatttaatataatttaatttatattttaaaatcatcttggcggctgggtgccaattataccataaagaggcaaagtagaagactggagccaccgaggaggctgctgcaggaatctaggcaaaagatatattagtgtggtagtggcaagcgtgctacattattatgatgtcctcggccttcttaagtgtttgcttcataaatcagtagagttgtgagctgtgacttggacctgataatgaatcattacttattttaaaattgatacatacaataacattcttaattttttataagctcatataaaatattgaaggaggattggtcttattttgcatctgtttattaaacattagactggagataaggttgtgaggccctagagccaaataaatattcccagccttgcctggcagacaattattgggtgtggaggttacccagcctccatgttgcctcagtgactccctttcctgtccttcactaggtaggaggcaaaaagctcagcagtgacacacaggctctgctctcctaattgctgtaaagaactgtgctgtttcttcttcaaaatgttgattgcaggcagctacagggatgtgctcttatgttacagtataaagattttttattgtaaagaaaggagatttgttggcatggtgggatgtgtgtatttgtgtgtgtgtgtgcaagtagctgtgcttgcactgggagactattttactttgcttttttcctctcccattataggaagtaatttttggaggaaaatagtatgacagtcctgatactattttatttattttcttcttcagagtaggtacaacagaaaatcctgaatttatgcttgttgtattttttctccctattatatttctgcgtgttcacacccctctattaacagagaaagtttatgctatattctgtactccttttactctttttattaagagaaagtgagaaagctgtcctagaattatacaaaatatacatatatttttccacatctgaagggtaaaggaattgtaattcatgggaatagagtgttaagggcttatacaatgatatatactatatatatatcattgtttgtatgtatgtacatatattgcacatatatacatatcactttttggctctacttttattattttcaagtttcttttatataaccccagctgctcttctgcatttagttaagtgcagtcctaccatgtctagaacccccttctattctgcctacattcacgactttcatccctcaactctggtcccatttatctgtcacttagcattaactacgttataatgccatttatcccttttgtgcatgcattatttctactcaagtgggccatttgcttttttagggcaaatatcataatatgcacctacttatatgctccacatctgcatcaattcagacagtttggttgcaagcaacagatactataggcttagactacctcaagttggtcaggaatgtattaaaagtctttggggtagcttacagaatcaaagcaaagactaaaggaagaggtttccaaaaacaatcagagaatcttgggaggtctaagtaacagggactaattaatagctattttaggctgcagctgctagaatgcataaactccaattatttccccccattcttacaacagcctgctgaagcctccaaggtattgggtcatgtgcttacccctaagagaagcagaaaaaaaaatcaccttttgacaatcctacacctctgtgaacaatgggaaggagatgtaatttcccaaaagaaaaccgggcactgagtggcccaaaacaattgtcctctataatatcaagcatactttggtgtccacagttggagctctttacagatctggtgtcagtgatggtgacgacaaggagaaggaagagttgtaaatgactttgctcttttgagtaagtgatcatcaaatgtccttgcagtcagaatggcaaacaaatggcatggcctgtcagtatctgaagttaatttgggctggctgtcctttctttttggatatttaggtttcagtaatgatttcccgaaggccacaataataaacatgtgttatgttataaaaagcgggtgctgcatacattggaagcaaggccccctaattgaatcacctgtgctatgactctttcaactcctaaggcataattgaagcactatctcagttggcatctttgtggtttccatccacacattcttactttctggtagctggattatgaacaaccccaaggtcaggcttgtgtagaacccaacatcttacatattttactattgataaaatacaccctgagtataaatgttcacataacactttctctcatctctatagttatgtttctttcttatgaccttggccacatactttaaactccttgggaaaatatgctgccgttaaaaacgcttcacctatttcttgaaaaatgaccgacaagatgtttttcgtccaattctgtcgtatatttctattccctagatttaaatttcctggacttaactgttccctatagttagcagaaacattattttaagaacaatttaagttgaacttcatgtgaaactggctactgaatctgagtcgggaccttcttctggagggaggtaattaaatattccttattgatgctattttaaatgtgttgaatgaaaggagttaattatacagcagggaacatggcagagttctgactaataatgagctcaatgtttaatgtcttcatctttgttagaatcattaaagttgtttgaaccaatcagatgtttcaagtgaatgtagactcacagctaaccagctccaaatggcaatccctcacagatgcaggagctggtatatctaatgatgacttcaggaaaaggatggcgatatattgctttcttccatgcagtataatctgtttcagttggtcttccatcgtgatggtaaagagaaaagaataagtcttatttccaaaatttcatgtgttataatggaatgatgtttgtgcctggacatataaaagaggaaatgattttgttttttccttaaagttttacgtagccaatctctttggaatctggtgcaatattgacatttctggctgccaattcctcacatgataaatgcattaacactaaatcttaggatgcccaggaatcactagaggaccaagcactgtcctaaagaatggatctcctgtaatactgttgtagagaaatgtaggctcttgaggtcaggtttttcataccgtattactggtttgttatgtgtctttaaataaattttgcaaactccccgacactcaaactacttcctcttaaatttctcctcccttctgattgcttcaccaaacagcctgtggctttgtttttatttacaggactcctaagactctgtcctgtcctgtctatgctggggaatgtaaagtacagaagattacttccttggttctccatggaagtccttttacccagctgtgaggattgtaacaatgattggcggtgacatcactctattactgaacttcacatatgggagttgggagactttgaggaatcagtagggtgaatttaccaagttctcccatgagcccaggcagccggggtgtgtgtgtgtgtgtatgtgagtgtgtgtgtgtgtgtgtgtgtgtgtgtgtgtgaaggaagagtaagtgttaggacagaacagcagccatcatgggaaagggaaatcctagttccacctaggatggttacttcgtggagagggttactttgggtagttacggcagccttcagggttttcaagaataatataacatatatgatttatatttttgaacttcgattttaccactgcgttccctccagtgtacttagtagagataggatcatgtgtatcgagagctcaggctttagaatcccacaggtctggaatgaaatctcagctctgacttttactacccatgtgactttggacaatttatgtatccactgtcagcccattagataacctttaaaatgggaataaagtagtgcttgctttgcagaattgctgtatggattaaatgagataattcaggtaaagcacatagttgagtgcaaaattaatttatcacatattattagaaatgtggttgaagattgttttgttatttagatgaatcatatttaaatctttcattttcaagtatctaagacttccaaggactaaaacttccctctgaattttaccactcatcccagctggagatctaagataactatttttgtgtttgtttgttaattatttgacatgtttcttctcaaattaagggaaaattcttatttcggagtcactgttcagaatgaaaatgtgagactaagtatttgttttgcaaagcgcaacagaatagagaagaaaagttgggcattctgtagggcgacccatttggaaaaataaatcctaccccttttgaaggggagaaattaatgagatgagtgtcagtccctccctccccacccactgacctctctctgggatcacacaccaacagcctatgatgaagtgttgctgcagtgcaatggagcaaggttaccttcacagtaacagcttttctctggccagattactttatagccaaagatgtggttattttcacctaaacgtttcatttaaatacattgtaaagtgtgacctaggaaaacgagacaaaatcattctaagctgtatagagttggattgtttgtagaaatgctggacattaaccaatgactctcaacttgaatgtacatcagaatccccaggagggcttgttaagaaacagattcctaaaaccttactccaaagtaggtgtcaggtggagcctgagaattttcatttctaacaaccttccaggtgttgctgatgctgctagccaaggaaccacacttagagaaacaccttcaaagtgcatattttcgtgtcttactattcaaagtatgctccctggaccacctgcattagcatcacctgagaccttgttggaaatgcaaattatcaggtcccacttcagatgtaatgaattagaattgtattttcatcaactccctgaagtgacttgtttgcatattaaagtttgaggaacactgatctagtgattatagccaaggtctttggagagttgagaatctgagacagtcagccctggattcaagtctcacctactgccattttctagccctgtgattttgggggtgttgtcatttttcttctttttaattcccaatttcatctgagaaattgggatgatcatacttgaaaagttgtgaagattaaatgtgataatgtaggtaaaatgcatacaattagtagtgttgttaaattatgtcttcatttctttttatgtgaaacctgtcctgtgaaaccattagaaacagctgtttgaagaaggtatttgaaattctctctgaagtgttttcctatgtcctgttttgagagaagctattttcacagtatggcattagattgtcctcactatattattttgtgtatgagtgacagctgtagagatatataatggtttgagtttgccaagtcacagccccctcgtttgacctctgaatttaagggtgtgtgtgtgtgtgtgtgtgtgtgtgtgtatgtgtgtgagagagagagagaaagagatacagatagacatttcgttggaggaggagtgtgagggaaaacctagggttttctttcttctctaataataaaatatgacataggctttcaaagataaaattcgatttgtaatatttgacaacactggttagtcagccctaacctcactgatatattatgaagatgaaggttatgccagttaataaagtgttttgagaacattgaaaggtgctaataaaattggatatttgactttttatttacgtatgtatgtatgtatgttttgagacagagttttcctcttattgcccaggctggagtgcaatggtgcgatatcagctcaccacaacctccaccttccaggttcaagggattctcctgcctcagcctcctgagtagctgggattacaggcatgcaccaccacgcccggctaattttgtatttttagcagagacaggtttctccatgtttgtcaggctggtctcgaattctcgacctcaggtgatccgcccacctcggcctcccaaagtgctgggattacaggcgtaagccaccgcgcctggcctgacattgtttaattttttaaagtacagcccttagtgataatttttccttttctgtagccagagaggattctagtattttggcagttggacgatatcttatctctctcaatgccctcatcagttgagaaataagcctctttcttttagtattttatattctcaaagctcagaacatttcagagtcatgttatgtaaaaatgaggtataatggctgcagagaaaataaattaaaatgagaattgcgctaatgcaaattaaaagggttaatgggagcattttcttctgggtctcaatgtaggtctctgtacagatgattgaggggtttttggatcctgagtgttattcagcttggaggggctcttttctgaaattgctggctcccatacaaataggcctcttaggaccagtcattatgatgcacaccttgcactataactacatttttaacatttacaggtagggcggtggagctcttcactgcttagttactacccagggtaatctccttcaactgtaacagcaagtcaccaagttcttaatgagtatctcctgttggtccatggtaatgagggtaggtgtgtgggagaggcaaactgtaagacctttcgctgcaaatcctataagcacttgccactcaaagtgcgatccacaaaaccagcagcagtagcagcacctaccagcttgttagaaatgcagagtctcaggccccacttcagacccactgaaagagaatcagcagtttaacaagatctccggaggctgtgggggagactcacaggcagcttaaagtttcaggagctctgctttaagaaacattcctttcagagagggaacttaaactgagccaagatctaaaaccatgtgaactccaaattcagagaatcaggtcagtggtcaccagaacagagggtataataattggttataaaccattctaatagttgtaggtttaaaggaacatgtaagtgtgaggtcagttattcactgtattatgaaagatatgctttatagtttgcctcaaaaaaaaggaagtctgattaaatgtcctcaatctatgtggcagatccaagtaagaccccaaaggttaaaaacaaaacaaagcaaaaagggcaatgccgtgatcaattgcaagtcagagttaagatcaaaattaaaatatgaggtttgtaaatacaatggtaatagaaatttgacgttagcatacgaggctccccattgtttggaaccctggtttaaaagctagaatcaaaagaattttgtctagacctaatgcatactctcacttaagctaagtggaaatctttgcctctgttccagtaaccaaatctgtggcagagctgggagtggaggtattggtgagggttgtgggtggggagcagtgtcatcccccaacacactttgtgacagtttttaaggaattagttgatgagactcttgtttattctatggtgcagagagattagaggaagcagtttgagagcaaaggtcagactgttgatgctgggttgaaatagtctctaagatgcagacaggtatagatgtcctgccaacaaccagcaacacagggttgtccccagacttgctctcctgatattagagtctggctattcttctgaaccaaatacattattttactttatgacaagtgctattacatttaaggactttagagacactgtgattctctctgacatcatagcaaaatttttatgtgtgtgcccaagtactactactttttttttttttcctttggcttcccaagaagaggacctacttattgtttgtatcagatttttcaaggcaccttgggatataaaattttaagtctgctgaattggagaatttctatttattttcccaggggaaccctttggagttctgtcctactcagctgcgttatcccctagatttctgtaactgtattagttaggatgctttggagtgctagaaacagcaaatctggctcaaattgctccaaccaataaaaccaagtcactgacatgtaactgtaaccgcccaatgggttcaccttgtctgctgcctagatagaaccgatttatcaagacaggggaattgcaatggggaaagggaaattcatgcagagccggctatgcaggagaccggagttttactattactcaaatcagtttccctgagcatttggggatcagagtttttcaagataatttggcgggtaggggcttgggaagtggggattggtcaggttggcaatggaatcatagggggtcgaggtgaggttttcttaatgtctgctgttcctgggtgtggtggcagaactggttggaccagattaccagtttgggtggtgtcagccgatccatcctgtgcaaggtctgcaaaatatctcaagtactgatcttaggagcagtttagggagcatcacagtcttgtagcctccagctgcatgactcctaaaccataattgctcatcttgtggctaatgtttgtcctacagaggcgatctagtctccaggcaagaaggaggtctgctttgggaaagggcttttatcgtctttgttttaaactgtaagctataaagtataaactaagtttctcccaaagttagttcagtctacccccaggaatgaacaaggacagcttggaggttagaagcaagatggagtcagttaagttaatctctttcactgtctcagtcataattttggaaaggcggttttataactgaaaagaacagcctggctcgctcttcatgagacttgatacagggtacaaaggtgtcacctagagcatttttttctttctctttatttcctgtgcctttcctgcatctgccagaagatgacctaccaaggctagatccttgtgtacctctcaaatgttggccaacaactctggggccaactgctttccctttcaatttgagttggagagaaataatttttgtcccatcaatctcaggaaaatactttcaatctcaggaaaatatttcaaatatttccttcaaattcactgaagttgggttgatatagtttacctgcacagtctggaggaaagaatcctttttcccttttttgaggagatgttgtcttgctctcttacccaggctgatctcgaactcctaggctcaagcaatcctcctgcctcggcctcccaaagtgctgggattacaggtgtgagccaccatgccctgcctgaaaaaatcacttttgccagagggatagctgatttagttagtgcatgtgctctatccctggagccagggcagtttctaaatggaagtcagtggaataaaattctgggaagagaggtaaaaaaatgtttaccagttttctcagaatgccagctctgtttgacacttctctctcaggactttgaagactccaagaggaatgtattattatctatattctactgaggcaagccctgaagtcaaaagttttaagtgaaataggtggggttgtgctactggtctgccaactccagatccttccagggctcatctgaccatgtaggagtctagtttatggtatccacccagctggtgctaggaggtgagtgagaggaagaagaggcagactctttctctctccaattagcctctgcctctctgtttggttaataagatccatatatttaatatgctcaatgtgctttaatgtgttaccaaaccatttgagtctgttgtcacataggaaatgtagaacttttcaaacactattaaattcccttaatcgattaaagatactgccaaaatggtttacatgaaagaactaacataatagattaaaatatctttttcttttacatttattcattacattaaattttatgccatggttatagatctgaaactaattaaaacaattatacattgacttttttattcctaaatgtatcatgtttttagatgtgtaaaaataagaaacagattcagatttaaaaaataagctatgactcaaaaaaaattaatgtgaaatgcatctggaaaatttctcttttgaaactgaaatattcctcttactaaaaagttgacaatataactctttgtaacacaaagtatatcaggagaatctttggcaaaatggtgaaagaaactcttacagaatatgtaagtcacctaagttccagaattcaatctgtgctaagatttttatggctcagagggaaatatcatggactctttatgttataaaaggagtgaactatgtgattatatcttattctgaatatcaactgtaagaagcagattctcacgggcttcatccaatatgctcttgtaattctttctaacatatgtcctctattcacgaagaacaagaaaacatctccagtttaactgcattttttgtttgttttattaaattctttttttgggtatttgcacgttccaactacccagaaaattactcaaaatatttgccttgtggtctctgtggcactgagcatttaaagcaaactagtgtagttttggcttggtagagattgaacaccctttcgtgtttcaaatatttttagagaagaaattcagatacaaaagccatataagatttatcatcactttgacattaagggagcagccatgggttaaattacttgctttaggtgggtaagggaaattgatattacaccgattctgtcctcagcaccagactgtgtaatgtggggtcaccagaaacctctgacacagctcctgtcctcggggtgtttatgatgaggttttgagaaaagccagactaataagaattagattcacaatgccatgtcttagcaggatgatatagtttgggtacttgtcctctccaaatctcatgttgaaatagaatccccagtgttggcgatgcagcctggcaggaggtgattgggtcatgggagcaagtctctcatgaatggtttagcaccctccctttggtaataagtgaattctccctctgagtccacatgagacttggttgtttaaaagtgtgtggcacctccctcctttgctttctttgttcctgctgtcaccttatgatacccccctttaccttctgccatgattgaaagttttctaaggcctcaccagaagctgagcaaatgttggcacatgcttcctgtacgtcctgcagatccatgaatcagttaaacctattttctttataaattatccaacctcaagtatttctttatggcaccacaaaaatggccgaacacacaagatatgtctgcttggcctccaaaataaatctcaggtctctgattctgcctctatcaacctacattaggccaccatcgtttctcacctaaaccacaactatattcccctaaatgatcttcttgcttcagtttttttccttgtactggtttatcctacctatggcaaccagagttattatttagaatgtaaaacacagcggctgggcacagtggctcacgcctataatcccagcactttgagaggcagaggagggtggattacctgaggtcaggagtcccaggtcagcctgaccaacatagtgaaaccccatctctgctaaaaatacaaaaaaattagctggatgtggtggtggcacctgtaatcccagctactcaggaggctgaggcaggagaatcacctgaacgcgggaggtggaggttgcagtgagcagagatcatgctgttgcactccagcctgggtaacaagagtgaaactctgtctcaaaaaataagataaggcaaggtaagataagataaggtgagataagacaagatatgagcacatcataaaatgatcttgccaaaaaaaagaccattcattgatgtcccagtgcacttaaaaatcctaactctttcttactgcctggaaatctttacatgatcactgctaaaatctcagatcttgtgtgctacccctctgcccctaaggtcactaccctctgatcacattaactttcctgttctttgaagatgtcttggaacttgccattgtttctgtgtgaaatgtgtttttcctgtatgcttaggtgtatcactcctcgttatccagggttcacttacatctcgcctcagtgaagagatttagcttgattgccccatccaaaaagatcttatttgttaacttatttacatggatactatgtcttccccaacttcaagttcatgaggtctgtgtttctgtcttgtttatcaccccaggctcaatgtcttaaaatagcacctcgtaggctctcaataacagaagatggcaccaaattaatacactgaaaatgccacaagattttagataaatgtaaaaacattcaggctttgattatttggtgaacattttgaggcattacgtgagttggagcaaaactcttgaggttaaataatatttgaatgggctctgagaggcaaggggagcgtggccatgcttgtccccccacccttatctgtattctgataagaaaatacagaataaatttctttgaaattaaaaaataactcaaactctctgtaattatttttctttaattttctgagagaaggtttttttttaatttggagaaatttttaaaaattaaataaaaactagaaataatacttaatgtcttgacaaagtattaacttgatctagtttcagaaagatctcattaaactgcctgataaagtgattattcagtgccactttcatagagttttcagtaattatctgaaatgatttttagaatgaggcaacgttttcctttttttttttttgaaacagagtctcgctctgtcacccaggctggagtgcagtggcgtgatctcggctcactactacctccgcctcctgggttcaagcgattctcctgcttcagcctcctgagtagctgggactataggcacgtgccaccacccctggctaattttttgtatttttagtagagatggggtttcatcatgttatccaggatggtctggatctcctgaccttgtgatccacatgccttggcctcccaaagtgctgggattacaggcgtgagccaccgcacctggccaacatttcccttttcagtagcaggtgaaaccgtcttggtattgacacagaaatgctgataggaaaaggtgatgaactcatacacactaaaaatatgacatctacctctaaaagttttagaaatatgtggaaagcattcttggcccttttctcctaagttaagactgttcgcaaatcacttttgagagcgaagtgacgatgacatttttctcactcaagtcctaactcatttctaggcatataatttgaattaaacccttatatataattttctaattagatttttcttctttcatggctttttaagctttacataacctttgtgcttcctttttccattaatccttcaaatgccagcatcctgccaagagggtatttaccgcagtatttccatcattgttaacagagccacaagtttttttccagtatattgaaattacccatccatgagaaaatgcagtcttggatttttaattatttagttgacgcttattcaactatatgatgtaagtaggccttttctccctaatgttttattaccagttaaagcacagacaggtattttactttaatttagatatagagtaggtaacagagagctgaaattttaaaaattagataaattttttggtagttagttttatagttaatcttctctctttttttttttttttgagacagagtctcgctctgtcgcccaggctggagtgcagtggcgcgatctctgcccactgcaagctccgcctcccgggttcacgccattttcctgcctcagcctcctgagtagctgggactacaggcgcccgccaccactcctggctaatttttttgtattttttagtagagacagggtttcactgtgttagccaggatggtctggatctcctgacctcgtgatccgcccacctcggcctcccaaagtgctgggattacaggcgtaagccaccgcgcccggcctaatcttcttaatttgtcacttagagtagggcagtcgccacaatatggaaatgagctgggattagtgttatcactgggaagtgattgtaacttttgggtttgtaccaagaagtatatagaattgcttaaacttctgcatgatcaattactgcagatttttgcacctagctccactacgtagtccatcacatttcatagggcgatttctccactcctttatcatagaaccttaggagagaatgttcttttataactcccttgatggagttgcttaatgctgcctttaatttaattgaaaatggttgatcaataaagtcactttttatggatttatttctactgtttgatgtggcaaatcattaattatcattacctaaattagcatggattgccatgaaagtgaaaggagtaaattgctttatggatttcctagtgcatagtacacatagaacttttctaaatatacatcctcttcagcagttagtttgtgccagatttcaattcctacgctacaagttctccagcaaactagaggtgtccatgtccaagtggacatgctaaaaaattcaaattttacagaaattttacagagaccttacttttgtaaggtctccggaatctttaaaaaaaatctatttaattattgatagaattttagtgaccaccatagaggggagtacctgtgtaagcagaaagcaggaggaaatgaacccatttccagaaaacgaactagacattaaggagaaaaaaagaagagaaagaaaagtaaaaagaaaggagagcaaatacctctaggttttttattctgaaagcccatgttatgggttgaattgtgtatctcacctccgtcctccccgggaaaaaaaaatacacacacacacacacacacacacacacacacacacacacacagacaatattatacataatatgttgatgtcctaacctctagtacctaaaaaccttaaaacctctagtacctcaaaaattgtatatagtatgttgaagtcctaacctctgttacctgtttggaaacagtcttaacagaggtaatcaagttaacatcaagtcatcagtgtgggccctaatctgataggactagtgtccttataagaggaaattttgatacagacatacatagaaagaagattatgcaaagagacacagggagaagatgccataggcaaaccaaggagagaggcctagagcagctcttagaaggaaccaattttgccaacaccttgattttggacttctggcctctagaactgggtggcaataagtttctgttgtttaaaccatagcatttgtggtagtttgttacagcatcactagcaaactaatacagcccataatttatgactagcatttcatattaaaattaaacatattatatgaaagcttccccaaacactggaatactataatctataagagttgcattaactattttcatggaacgtcagaatgtggaatccaaagaaattcagagcctaagctgggtactatcaaagcattttataatcaaacattcaagtatgctctgattgagagaattgatttccatatgtatctttaataaaggaacccaactttcatactttcattgtattaacaagaacaaggcacagactttgttaagcctgattctgaatgttaagtaagccaagggtgaggaactaaaatttgtagagaattgagtcatgtagtgtctactctactgtgggactctggtgttggaattatcaaatgacaatgtgaatgcatcatagagatttatcctggactagcttacacttggaccaaaggtgatttatcaggcttatcattttatattgaagtccataaactctctcttctgcatccctctgttcgggagtgtgtgtggcatagaacaaatcagcctttggcacacattggaggaaagggtgtgtgttttgttttcataggttttttttagtgatgacaatcaaaagcccattttcttgattcctatggatatgaagccgattaagtattgataaggagtaaggtattagagtttaaaatcggggccatctctgagctacatggttaggtcagtggcacctttctctgaatccataatcctccaagccatttcaggccttttatgcagtcctactgcaacccagaactccttctaggccttcctctccaggagcagttatgagattgagtgttaactgcttataagacaccatatgctacacaaaactttttataaatgttgtgcttatatcaactttgacattaatgctattataatcctcaatttacagaagaagaaactgaggcttgaagcggttaaatgacttccccagagacacatagcagtatatgctagaggcaggactccaacccagaactggcagaaaagctgatactttcaaactttcaactaatggtctctgcagcctccaaagtatcagatttctccgtcaaatccttcttgcctggtctgtctgaccaactaatctctgataatgtaacgaaggttataataaatcccttccagagaggatatttgcatttaactggatgtttatgaaataatgtgctggcagaaagaaatgatactcatggtgggaatttctcattctttttctggtggaatgtataatcttggacaaatcatgaccgcaggagtcttcattttatcatctataaatgccaggattgggttaactactgtctaaagatctcttccagattcaaaattctatgattctttcacattaaatgcaactccttttcaacatatgtgtatacttggccctttattgaacctttttataagctgccaattggaaatacacagtcacggtagatatgacaatgagcaagtcacttaataactatcagcctcagtttcctaatctacaaaaggaggctattaagagcacctacctcacagtgttaatattatatacacaagtagcaaaatgtctggaacagagcaagggctcactagctatagctttaataacgtgataactgatggtgtgatcagttctattatcatctccctgcagaaatcacagtttatctaaggttatagtaaaagcacccatcatgacttcttttaatcataaagcatttcatgcagagtgcatattttaactttgtattctaaaggcattggtgtctcactaaaagctgggcagtatttatatcaaacagtatatcatctatgtgttcatttatgcatgcagactttcacccccctccaagctatgagaacaataggcgctttaaaagtctgaagcaagaaggatattagctccatgaatctttattttaaattacatttctgagttagaagtgtcaaaatggtagaacaagttaagcaagattgcattccccagtagggctattgatgttggttgcaaataaattgctggagcaggtgatgatagcaaagtccatgccatcttttatttagcaaagtatttctcttgttaacagctccttctgcatgctttcctttcttctgtttcacatcaatcatatttgacacattgcccaatgtcagggtaaaaaaaaaatgcagcgtctggctaatcatccagatgtttggcctcacactgactgaaacatctggttgtgtagctaaatgttatgttctttcatccagttattttgtgttctgttagacagaactgaagaataaaccctaggatcttcttctattaggataaagcttatagaatctcgaacttgagattccagaaccaaggccttactggttctcatagttgcacagctgtcagcagaatccggatcaattgagataatgtgtgtggaagcattatatagtatgtggaggcattatatggatttgagaagctcatgttaaaagaattctactccctttacttggttatacaatggccaaagaatgtttgtcttctggaaagaagttttaaaacagaataaaaattaattggtgttagaagccaagatttcagagctagaccaataataataacagctaagatatgtctgatgctaactctgatccatgaactcttctaagtgctctgcatagatgtaaaaacaatcctttgaagtggaccctactctttttttccattttacaaatgaagtaactaaggatgagagtgcagttaacaatttaccccagttcagaagctcaaaatttggattcagacaatttgatttcagagtctacgtatttaacttgtaaacttcctctgaaatcaaaatgtttattcagcttccaacaccatcacttattaaacttggttttgtcaccttaaagtggggatagcatgacataccttaaaaggattgttgtaaaggttaattgaaaggatgcatgtaaaacatttaacaatgttgttttttggtaagtagtaagtaaaagtagctattttttctctatgttatgcaatatttggaatcaaatatttcaatactaatttaaataatatattctaataatctcactttctgaaaattcattcaatataatttttttttcttggaagaacattcctagcaggttaagcacttttgatcaactcttgatataggctgttcttaaaataattggaagtccacaaattatatgtttctggaaactattctgaatatggaaaattatattcctttttctttttaatgaacatataatgagtatgtattaaggggaagatatatgctgagcttcctcttgccttccttttctcccccttcatttctgtcaccctgcctttcctatcttcacaatggtcctgtacagtaaactttgtttgcttttgcatttgaactttaggaatcaaggtttttaaagaagctgcatcatgtatcataaataaaaacgaaaaaaatgaagtgtaatattttaaactgttttagaacatgaggctcagtgttctatccaacaggctatgaaatattgctgttactaataagtatgatgatgaaagccactgattcttggacaactactatatgcctgacatattgctgggtgctttgcatacattttctcatttaacgcttagaagttcttgtgattgacacttgggtatcatgagcaactttgctcaccattttttcctatggtccggcgtctttagtcacttgtattactgttgttcagagtgacctttatttgattcatttacctttcagaatcttctattactcatgtatgaggaccacacatttataattagggagtaaatttggtcatcaactcggataaggcaatgggcaaatctgacatgttttcaaagacttttcagtatgctaactttcagtagggctggtttctataacagctacgacatcttttgtcaacactcaggctgattaaattgcaagattataatgttttccgaccctaagtgaaagtgacacattcttgttcttttagtggcttcataaaagtcaaatgtttaatctcaggaggaaatttaaaagatggaagtaaaaccttaatgagatgcaacataaataatagaagtccctttgcgtgaaatgacttgtgatgaggtttcttcaaaggaacaaactataaaatggagtgtttcagaaacctaaaatacactagtaaacactgcgttttaaaaatatggtatcaatgatactcagcattcagtaaataaaaagagttagacaactggtgtctgtaaaaatgttaattttccaaaacactataaatgtatcaccaaaaaataaacattttttaaaaaaattaggtgactattttcatgaatttttagtccatgaaacctgaggagttacttgaccacagcaaagattctttctaatcctttatccagccttttgtgcaatagtacctcctgttccactcacatttcacatgcctgtatgcatgtacattcagatgtgcctgtctttgtctcccagtgcttgttacacagaaggtattcaagaaatggtagccattctcacaatatcattcctattaccatttaaaaatgtatgtggaaaagggtaaagtgcaaacctgggttgttaaaataccggaaggatatctataatttaacaccagttcatttttgttttcaaatcactccaaaatgccctcacttattggtttagaaataatgtaacaaaacaaattgtgttgtgtctccaaagaacattttgctaagtgccagagctgtatataacactaaagtagatgctgacatatgaggattgtgagagatgaatggtgatatttggcttttgcttcccaagtataggtcgtgtccgaggtatagataattgttgttggtttatgataattcgacttgcggagttaggtcagtcagcatagatgcatattttttggatggttttttaacaatgttgcttaaaattttaaatcagattatttgccaaaggggggtgacaagatttggttattagcaaaaaggaaaatattaatctagatttgtttggtcttagtactgattatgaataagtcatcaatagttaatgataaggaatcagtctgctgtgccatattggtagatgaaatgctgctactcctcctattcctgggcttttctgtcccccacccccttccttccctccttcctctgtccctccaactcttcttcacatctcccaactcccccaattcacttcttttccactgcatgccatgttaccctatgcctagttatgatcctaattgtaaccctagttagagtagacacaaagtaaactcaggagcagggattataaagctcaaaattgttcctcggctccgcattttgtgtttattaacctattttacccttgcagcaactccaagcaagtctgtaaattttagcattgagagttctccattttgtgagacccctctgtctggtcaaagtgggatgacagttggtcactatagcattcaataattatccactatggttatttttattcttacagcttttattgaaagtttctttttaaccatagtgccaaagacaaaataaacaataaatattaatgattttcttggcttctatttatgatattgttattttacttttaaattctttggtatcttctgccctttcatcttttctgttctgttcagtcaagacttagctgatcctatctcaacctcaaacatatcttttctatttcatctcttgactagttagaaactttcacggcagctaaaatctcccacacaaatctgagtaaagaaaccctagaggtcaaagattgtagtgtaaataaaagtattttcctttatatatgatataatttatatgtgttatataatatgaagtctcaattagaatagggaaaatgaaattcaataattattagagtattatttgcgaagtgttctgctaatatttttcctcctattaatcaaaattagttttgtattttttttccatagcaaagtagtctaacaatagagaagaatgtcttttaaaagactaaattaggtgaaatctattctttttgttaaattatcctaatgtaaaaccaggtggcctgattaaaactagccttctttgctgcctcctactgtttcaagaaaaaggtcgccttaacacttagtttctcttgctgtcttttgtttggagtatgtgtgggggtgtgttatttatgcaggcatagctcctcattatgggaactccaagagcctgattgtgactgttttttaatgccgcctgctgtgttgtccttaaactcttgcttttcctggaatgcacaactttctcccagctcctggtttagccattggtgtcatgtcttcatgctgcatccttgtgcctctgaaatcgtgttcaaaagagtgtttatgtttcaaattcatccacagtctcaccacatttaaagataattgcagaaggtaaaacactattaataggaacaaatttactagcatctcttttactatgtgtcttatgcataaagcagtttctggttgttgggttatacagtgcctattgtgatagtctattctaccttcacctcccgccccactgcctccccatttaactaaagctcctgctgatatgttcaatttacttttttttcttttttttgaaatggagtctggctctgttgcccaggctgaagtgcagtgatgcgatcttggatcactgcaacctaagcctcctggggttcaagtgattctgctgcctcagcttctggagtagctgagactacaggtgggtgccaccaggcctagctaatttttgtatttttagtagaggcagagtttcactttgtggcgaggctggtctcgaactcctcacctcaagtgatctgcccacctcgtcctcccaaagtgctgggattagagacgtgagccactgagcccagcctgatatgttcaatttgataaatgaatgtgttgaaagatataaaatgtgttaatccctaattgcatgtggctgtgatatttaatatggctgattctaatggagtttgtaacttatggggaacactatgaatgggatattataaatatttgtatgaagtaatacaagagacatttcaacagaaaaccatgtgatctatgccctccatcattattttctttctgtgtaacaaatgaccaagtaaaagtagtgaattaaaatatgagtaagtctattttcacagtattcataatttattataaacttcttttttaaaaaaataaaaaaaattaacttctattcctttaacaaagcaaagcaaaccaacattattatcagctaatgccatttgatttcggtttggtttggtcagtctcagggtggccaatcatttaagttttctgggactgttccaatttaagcactgaaagtttcacttcctgggaaaacacacactcctttgagtatttaccgttgacttccaggtgacccacttaagggcttcttccagaagggcaggcaataagactatcaagactcttcaaagcactcttccccaaagccattagatgaggtccaattttctcagcttgatatttctgagaactgctcttcctttatttccaggatttaagaaaaataaaataaactgatatatatatacatacctttagaaggattcagaaaagaagaaatggccgtttcaccccaatatgtcactatagatatgaatgccactcatagaattgacacgtcatgtttttaacttctgtgctttaggattttcctgtttgaattgtttatgtgcatgtgattttggtggaatttcttcccctttcctctgttccttgctccttcttttgctcagtcagcataggaacatagctcccacactaggaagggctggaggttagtaacatcaagcagtgggctttcaagttagtttgcaccttggtttggaagtgtttgctcaggtctcagatacacaggagactgtgtaatcactcttgtggcatctactacacacagcacgtgagttattcctaaactgagcacaggctcctgggtggtgaatcctagtctttttatctcctgcaggctaagccttggtatttccttcagattacaccaaaaccaaaataatgggcaatgttgtccctgaatgttcaaattaggttgagtacacagagccaaagactatcaaaagaaagtgtcctggccgggcatggtggctcacgcctgtaatcccagcacttcgggactttgggaggcagaggcgagccgatcacgcggtcaggagatcaagactatcctggctaacatggtgaaaccccgtctctactaaaaatacagaaacaaaatcagccaggcatggtggcgggcgcctgtagtcccagctgctccggaggctgaggcgggagaatggtgtgaacctgggaggcggagcttacagtgagcagagatcgcactactgcactccagcctgactctgtctcaaaaaaaaaaaaaaagaaagaaagagagaaagaaagaaagaaagaaagagaaagaaagaaagaaagaaagaaagaaagaaagaaagaaagaaagaaagaaagaaagaaagtgtcctaaaagaagtggtggtacctgtggggcgtgtttggtgtcagagtgtttctgctaaggttattttaattagcctcctcccaaagccctccccctattctccttgaggaactgtttgaccgtcacatccttagaaaggccaaaccactactaactctcctgaccctctgccttatcctcatacccttaaagatgtgacttaaaagagaaaaaattatgttgttaatttcatcaactagggcaaaggggaaaaatgttcatttcgatgcaggaagttaatgggagatgggaggaagctacggttacaattcccataatacattaatgtatatttaatataccaccttgatttgtggcctcaagttaaataactacatatgtttgcagcataattcttttcataattgtgtagcctcaatgggataacatttgtattagtttccataatcgaaaatgtcaaatgcctgtttccaccttccaagtattttggttttaggtagcaaagacaattctttcaatgcgtatctgttctcattaagttctgattgctttataaagaaataaagtcttttcccattgttctgctctgtggaagtcaccttcagagtaagggtgggggtgactgtccttgccaatttttaagtaactgccttgcaagggtgattccctacagagttattttctgcatagtttccctctgggtacagaatgtgggaaagtagatgcaacgcattttagagtagtcatttgctctaataattagcattatagtacagtgtatgggctggcttcctgttgaggtctagatttctacatataatgtaggtttttctattctgtcctatattaatttcattggagttactctttatcagagcaaacatccgtaacatttagtctttttttttttttttttggagacagagtcttgctctgtcgcccaggctggagtacagtggcgtgatcttggctcactgcaacctcttcctccaaggttcaagtgattctcctgcctcagcctcccaagtagctgggattaccggtgtgtgccaccacacctggctaatttttgtatttttagtagacatggggtttcaccatgttgagcagagcaataactctgtagggaatcacccttgcaagccagttacttaaaaattggcaaggacagtcacccccactattactctgaaggtgacttccacagagcagaacaatgggaaaagactttatttctttataaagcaatcagaacttaatgagaacagatacgcattgaaagaattgtctttgctacctaaaacgaaaatacttggaaggtggaaacaggcatttgacattttcgattatggaaactaatacaaatgttatcccattgaggctacacaattatgaaaagaattatgctgcaaacatatgtagttatttaacttgaggccacaaatcaaggtggtatattaaatatacattaatgtattacgggaattgtaaccgtagcttcctcccaactcccattaacttcctgcatcaaaatgaacatttttcccctttgccctagttgatgaaattaacaacataattttttctcttttaagtcacatctttaaggatatgaggataaggcagagggtcaggagagttagtagtggtcttgaactcctgacctcaggtggtccgcctaccttggcctcccaaagtgctaggattacaggcgtgagccactgtgcccagccatttgtaatatttacagagcattgctctttttcttatcatggaaagttattccaatatctattcattctatacacatttattaagcatctactatgtgccaatgttaaagaggtgaaagtgtaaccttggccctcagactgactttttgcaggttatgctgaaagatgaatgctcagtaatagctcgtgccttaagacgtggccgagcaagctttggaggtaaaatagctcatggagtttttatttatttatttattctttaaaaatggtcacaaagatttcagataaacaatctgagtatggctaaattatttttcttaggtaaacataggaggcaagaaattaaaagggtgggagaaacattaattaggctatgctcttatcaagtagtgtgaccttagcgaatttacctaatctttttgaacctcagtgtcctcatttataaaatggaggcataactttttatgaagattaagataatgtgtgaacaatctgtgcagtagtagttgctcaataaatggtagtgattttcacatgtatttggactattgtagaatatagaaaagaatatcatgcaaactctagtcctttaaatatgagtgaggaagaggaatcacctgtgtgtatgtgattaaagctgttagctatgatgaaggcagggtgatttttctctgaagggtaattcgagtacagagatattactttgaagaagtaatatgttaaatgaaatcattggggctgaaagtggtaacaacattctgggaaaggagccgtttactctcttcacctctaagataaaccataatgcatgcatgtatttaataaactgtgatagctagagctgtttcactggggcatcagtaagctatcctcaacccccttttcttttcttccagcttttcacttccaaccccctaagttttatcagaattagttaatactgagtccagctgaatacattgcttgttataaatagaatgctttctcccttcctctgcccctgaccaaacaattgattacaaagtttatctgctgagtgcggtggctcatgcctgtaattccagcactttgggaggccgaggtgggtggatcacttgaggtcaggagtttgagactagcctggccaacatggtgacaccccgtctctataaaaaatataaaaattagcccagtgtgttggtgcatgcctgtaatcacagctacttgagaggttgaggcaggagaatcacttgaacccaggaggcagaggttgcagtgagctgaaatcacgccacggcactccagtctgggtgacgggctaaatagaatgaaaaaggaatgacccatacctgaaatgtttaacataataaaatgactgatatcgattgatgacgttgagagcaatgaccagatataagggaacaatgtgtttttacttggattgtagatatcaagaatacaggagaatggaatgggagggctaacaactctagacaacatggctgcaatctatgactttgcattcttgctataatttactttcagtgcttttacaaatgtaagactctcgaggccagcagtgtatcttttacgctattcattctacttttataattattattattattattattattattattattattatttgcaacctctgcctccaggtttccaacaattcttctgcctcagcctcccgagtagctgggattacaggcgcgggccaccatgcccagctaattttttattttattttattttatttatttattttttattatactttaagttctagggtacatgtgcacaacgtgcaggattgttacatatgtatacctgtgccatgttggtgtgctgcacccattaactcgtcatttacattaggtatatctcctaatgctatccctcccctctccccccaccccaccacaggccccagtgtaagaaatacaataaacaaagtatcttttattttggctacgtagttatgttgagggtcattcatcgtcctccagtttagcctatttggaacggtactggttaatctcaataaacaaataacattgtcagtttaattgttcaattattggagggaaataaatatatattaacctaaatgttaaattctgcaggaaaaaaactgattagacatagacaatatcaacatgggtttgttaaataacttgccttccaacaggacccaaccagaaattggaacctatgtttcatagaaacatgattcttagaaatgatctttacacaattgtaaaacaaagggaagattatgtgacgcagatgccaagaaatcagacctaggcaccatgtacaagtatacaagcaatgccgagttcatcagtcccatggctgctgctaaattgggctttatccccagcaaattaacacagttccagcaggcacgataagtttactctgaccagattactgggttgaatggcatatgccgttattttagaaagatgcagaataacatttccatttagagtcctggcagaacaaagcttggatttgggcaatagataaaaacacatagagagtatttgcagatgcatgtgatagatagaaatggtgagtgaccatttagaaatttagaattggaatttttttttttttttttgagtctcgttctgtcacccaggctggagtagtgcaatggtgtgatcttggctcactgcaacctccacctcctgggttcaagcaattctcctcccccagcctcctgagtagctggaattataggcgcccacaaccgcacctggctaattttgtatttttagtagagacagggtttcgccatgttggccaggctggtctcaaactcctgacctcaggtgatccacctgcctcggcctcccaaagtgctgggattataggcgtgagccactgcacccgacaaaaattgtctcttttttgatatttcctagagcagtgtggctcatttagattgaaatatctgtcagaagctatataccagttccattgatttcaacattaaaatgtctccacatattcttccgcatccttcttccagctcatagctgtaattagtgttatgctccatggagtggcagaagaccagctgaacaaacagccatgtacgtaggaacagttccaggcagctaaaagagcttcttcctcacttgccactatcttaaatggtatctggtgtctacagttgctccttctactttcttaagaaaaaaaaaaaaaaaatccaaatggaaaagaggactctgaagacaaattagtcctttacaattataattttatttgatttcaaagcagtacttggtatagcaccagtccaaacagattggaagaatgatattttcattccagctcctgcatagaatatctttgtgcttttcaattgctttagggagcttgcaacaatagaatcctgttaaatctaacaccattttgaactcttccttgccgatattgtgataagaaatttatacctggcccaggtttatctctgttgataatgggcttcatggctatagggacatgttgatatggtgagctagcacctatcattttgacacctactctttagtagacatagagaataatgggtgcttggggtaaagtgctggagaagagtgtcagcagtcagtgtgtatgaacctagtgatggatgtctctgtgtttgtgctgtggccatatctgtatggctatcattctttcttcctcttctcatttcttttaattttccttcaacagtctttcatttgttgcttcaattcactccatttctccccagttcttcttttttctgtcttctataattctagataaaattatgacatgacttaaaatatcctccttttttgtccgtgattgctttcaatggttctaatgaccccattggaagtctggtgattaggccctgaggggccacagtaatggaaaccttgtgttcagccttcataagggtgatccaaaaatgttattacattacttacacctctttctgtaagtattttttcttcattcacttcgaagtatgggatgcttcccatgtgcaggagaattagctcattcataactcaaaggcaagtaatttcatgttttgctatttataagagaggagtctatcatgcaaggatgcaaaggagtatgaaatcagtcacaaatgtaggaaataaaaggcaataagcttccattaaaccaaacaaaagaaaaattaataattaggcagtctctttgcaagtacataataataatactctatttttcaatgaatcaattaggtaaaaatgaaacaaaataaatgcaaagagagccctcaaaaatatatcacttttacatatgtaatataagttgaacatctcattagaataatgtgacttttttaaaatttatttttgcttcctagagttcataaatcttcaggtggtaagtaggggttctttagctattcataatgcaacttgcttaggttaattagtagagaccctttcccttcacagctgaatatgagtgcccctacttactattcaaaaatccccaaaaccagcactcttctatatattggtgcttggaagagattgtatttttcattgacctgcaatattaggtattttattataaataaagtctcaaacaggctttattttatttgtcagattctcttttggtttcgtctcataaaatattagctgaatagttattatataaaaaggaaatgatcagaatatcacatttcgggtggtggtgtttagtttgtgggttccttcatgtgacaggttgaactgggtggtagagaattctgagttctgtacaacagagtgattgatttctcggtttgcatttcttggcatctggcagtgacaccactgcagaccgagagcagaaaatggacagtagggaaaaatgcaacatttctacttggtccagctgcctttgaaggatgctgatgtttcattttttatttcttaccccaaacatatttatttgctgagtcattaaatagggcaagtgttatttctttctttgtatttgccatctcaccacagaagagttttattggccgggcgcggtggctcacgcctgtaatcccagcactttgggaggccgaggcgggtggatcatgaggtcaggagatcgagaccatcctggctaacaaggtgaaaccccgtctctactaaaaatataaaaaattagccgggcgcggtggcgggcgcctgtagtcccagctactcgggaggctgaggcaggagaatggcatgaacccgggaagcggagcttgcagtgagccgagattgcgccactgcagtccgcagtccggcctgggcgacagagcgagactctgtctcaaaaaaaaaaaaaaaaaaagaaaaaaaagaagagttttattaaaccatctcgaatcgatattgttttggcacaaattgcactaataacttgaatatatagttttgtttttttaaaggtgccttcaaaatctgatacgtataatgtatgttaaaattgatatttctgtgaaagaggttaagatcagaccgctttctgattgcagagataaaattgatagttaacaagtatttattaaacatctattatgtgactagtactatgctagggcatgatgaaaatgattcaagatgaaccatgcaagcacccctctcttcagcacctctgtgtgtaaaacataaacagaatgctatgattaacactgaaagggttcagtccgggatacttgggataaaaatcggagcactgataagttacttgtcatgtacttacttttttaaaaatttaaaattttttaattatgggtacataataagtatatatgtatggtatacatgtgatattgtgatacaggcatataatgtgaaatatcacatcaagataattggagtattcattacctcaagcatttactgtttctttgtgttaggaacattccaattccacttttttaatttttaaaaatatgcaatacataattgttgactatagtcaccctgttgtgctatcaaatgctagattttattcattctatcaatgtttttgcacccgctaactgtctctacctttcccttctctccccaatacccttcccagcttctggtaactgtcattctactctctatcttcatgagttcaattgttttaattcttagctcccatataaaagtgagaacattccatgcacttctaatttagactcttctcctctttctctgtcttctttttttccatagctcactaattttgggcatctcttctcatttacagtagcttgctgctcttcattcattaattattacaatatataattctaccaagaagcccaaagaactatagtgtttttatgtcattattctcagttcagaaagaaagcatgtgtgtggcacagggaaggcatttgaatgaatgtatgcattttctggatagcattctcgaacagagatttgatgagagtcacatggataattttaacttttctagtagcaatattaaaaacacagaaatagcttctcaataactgaatcagtaatccatttttaaaatctttttcaattcattaaaattaaatagaattaaaaactcagtcccttagtcttttttttttttttttttttggagatggagtcttgctctgtcacccaggctggagtgcagtggcgcattcttggctcactgcaagctctgcctcctgggttcatgcctttctcctgcctcagcctcccaagtagctgggactacaggcgtccaccaccacgcctagcttattttttgtatttttagtagagacagggttttactgtgttagccaggatggtctcgatctcctgacctcgtgatccaccagcctcagcctccaaaagtgctgggattacaggcgtgagccaccacgccctgcccccttagtctgactgaccaaatttcatgtgtttacggattgacaaccatgtgggtagtgcaggttttggatgcatggcaggctgaagcttatgtagcacatatttgaccttcacattttattaagtctaattttttaaagttttgtctgttcatttacatgtggaaggatgatagaaatataggaagagacatgacagaaagcttgcctaggactcagatcaaggattcagatttcccaattccggcttcagggccctgttctgtaacatcacatcagggaaaggaaaatgagagaaaagaagaaagaataagaactaatgttaattcatgtcagacacagtgccaaagatctttatttgcattattgttattattttttaaaaaataaatagactagcacgtagcctagcttacacacttctcattgtatagatgaggaaactgggaatcagttaaactttataaccacaccaagatcattgagctagtaagtggcaggcttgggatttaagaaagcttgtaatgatgttacatttgatggtttaaactgtgctgtgggaagggaatccaagaagataatcccatgtttctgcttcttgtgatgtttgcaaatctgtgttctggagtaagtctttgagttgactcttggagcttctgaaacgtctattggatatactataaccaaagataaataaataaataaaaagatcagggttcctgaacgttttcatctttacattgattgcaatgattacaagtgatcatttcatcacttggagcattattacctctatggggctttacatgatactgactttgtcaataaaaggacatattaggagcaggatttctgtttgggccagaacaaggggacataccctatttttaaaattccccagtttaggaattgaagtgactgcatactaaagttggccaaatttcatgtggctatggaatgagaatatatgaaaagttggttgtaaaaacaattaagaggattggggcagactattttatggatcccttcctccttagcttctgaaatgaactaacattgattctacaaccacttattaaatacctactttttgccatggctgatgctaagtgttgaggctagaaatgcatatgaattatattttaataagcacagaataaagaaaacttgtcttcctaatttttactttaaaagacttttatctcattgtttaagtgccataattgtacaaagcatgctgttctgagttcagtgtttcttggctcattctcagtcaatactctgcatagcatctttgaattccttactcatcaaagggtaatgagttaatttgtgtactctacctctgccaccttttgagctgtgttgttgaccattccctatacatttgcatctctgtctgccagaagatgtaccaggaaaataaaagcagcagaaaatcttataacttcccacctagacatcagtcaccatcagagtttggtctggaaacagaaaagtttatttaaaacaaaattggtactctgtgaatatttcaaccatttgttccatttaatccccattagtgaatttgcttagattaatttttttgtggattccatttccaagaatgaaagcaaaataattacatcaaaaggccactgaaatcagccaaattctctggcaggaaacttattctattcagtcacattcaaactatcaggtatgaaaaatacctttcaccactggataatacaacaatggagttggaaaatcaatcgtgtggtaaataagcaaaaactacgtgcaaacagaggaaagaagagttgttctgaaaatggtatttcaataaaagttatagtgatgacgagcagtgtgatgatgtaggaagttccaaaactaggtagagggtataatcaaaggtgggtacaatggaacaagcctggaggcaaggacgggccagtcaggaacaggtgggcttatagtgaaagaaagtggaggctttagaagtagagtatttgatgaattcttccgtccattctattttggcttctatgtcaaggaggatgacagatattcattgtgtagttttataggaaaggcgattggtagtgacttcaatgttataaagaacttggccaagtccataaaatgtccatggtgtataacaaatcttttatggtgagtgatccatggaattaggtacttagaaaagtcgattgaaacatattcacagaaaggcaaaggtttgatgacctggtgcatggaatgagacagagacactgagaaattttgattgtacaagtttttcctaatatcccacttacatcctgtagcggtgtgggcccatttattcttttttatgtttggtttccctgtctcatggtaaaatcatggacagatgttacccctcaattttctctttttcaattatttctgatccttctcactttaatcagtttacttgatagtctctgcgctagtgtaatttctccagccttttgaaaaatgtagacgcttgagccagacaaaagcacttcagcaggaacatgactaatcttgaagacatagagcagggctgataatgtacgccaggaactgtcagttaagaaatagtgatactgcattgctgactcacagtcagctcatgggtcactatgctgcccccattctgttgagatttcagtacactttccgtatatggagtttctgtgttggtacacatccagaaggtttcttgggcgcattgaccttcacatattgtttggttaatttacctaacttggtattaatcagacagaaaagacaaacatgaagtaaggaaagtcggcctttgctgttctcccttgaacttggcttcacttctatccccaccatttagtaaggaagaacagccccaatttattgagttgctatgagccagacactgtgtaagcactttctacacattattgcatttaattctccaaagaatgagataactattataatctctgttttatagaacaaccagctaaagtttatcgggttttttttgtttctgtttttttgggtttttttttgttttttttttttgagatggagttttgctcttattgcccaggctggagtgaaatggcgccatcttggctcactgcaacctctgcctccggggttcaaacgattctcctgcctcagcctcccgagtagctgggattacaggcatgcgctaccatgcctggctaattttgtttttttagtagagacagggtttctccatgtcggtcaggctggtctcgaactcctgacctcaggtgatctgcctgcctcagcctcccaaagtgctgggattacaggcatgagccaccgtgcctggccaagtttatgttaaataactcgtccagaaggtgtagtgggatgtttgactccaaaatacatgcttttaccgcctcaactgactgagcttgggactacctctaactttcattagaaacacaaatctttttctaataaactttcttcttcttttcaataaaaacatttcccacaaggtgacttaaattcattcacaattaggtataaatactgataagagcagttaacttgttttaagagtctaatatgtgctaagccttatgccagatgctttacaagcattatcttaaaccttgtaacaattttgcaaaaatgttactctattttatagaaccaaaacccaagactatgaaaacctaaatatcatcctcagagtcatacagcgaagcagaaattgtatcagctaatgagacttagtgccatttctctcatattgtgtgagaaaaatggcaatgctcaataaatgttgttctaactgttccaggtatcaagcagtagaaaaagaatatggcagatcaggtggattttgctgtcagccctggaaacactcagctggtggctacataatccatcatctcctgaagctttcattgtccacattttttttctaccctttagtcatgtgtttgtaaggaataaattactaaaatacaccataccttttaaaatatagaataaaagctcacagagagttagggtgacagaacatatgattcaaccttctgccttctggcagacagtaggctatttcttttaggtgggtatctaggaatagatacttgcatataatattttttttttgaatcccagactggtcctactaacattcttgattaccacttatttaagtgaccatcaaaccagttttatatctgatatgtttaatccaaataaatgtctttttttaaaaaactgtttaaaaaatggtatttaaatccttcccagattttagctgtgtatagtctggaaggaaacccattcacatggttttatcaggtttgatatttaatagatcaaattagtaaaacagggccctcacttcacaggcacggtgaattctttgttgataagatctatcaatgatcagtatggatcattggatggcagtgaacgtatacgtttgtggggaaaattcttatgcaccttcatagtaatggtactgcccattttatttgaggataattaaaacacaaaatacccaacgatgctgtttttattgtaggtatatgttaattcctctagagatagacaagactctaaattcatggaactttaagtgggatgttccacaaaggaaactctttaaaataatatagaaaaataaataagtaaatgtcaaccaaaatggcagaacatttaaaatcagtctgccaaatatcttttctcactttacttcatttgttgaacaatttatatgctgatatagatggccattttaacagtgtatacaaagcatttatatccacacatgtacatttaatcaaacctacatgtctacatacacatacttaagacacacatagagagtgtgtgagagagaatcaactcatcataattgtaaaggtgaagaaaattgattccttaagactaaaacacaccatattaaacttggagtttatattttgaaaataagattcaggaagtcttctaaagcattcgaagattgattagaaagataaatttcggcacacagggtctctgttcttgtaactttccctgtggtagcttatccctctgtataatacattttgtcatcattctttctttcctccctgatacaataaaaataatttccaaggttagattctatcttgcaagagcttttccccaaggaggtgcatgcatcttcttaatttattatattatataataattcctcataggaaaactaaaggcaaattaaaaccacatggagataatgcctgactgtgctttagactgttgtctaccactggctctttagaaaaagatcagagatacccctctcttgattgtccattttcttgatcatgcaatgtggtattttaagttctatgctggctttgatgcttttgttagtcaaggtgcatgtgtgaatgtgtgaattggatatgtgaatgattttaatattagcttaaataaaacattactgggaagacaaattttctgaaattcccattttcctcttccacttcccctacccccaaagaaacttgacatattcgtttcaaagcatacactgcttttttactatttttatttttatcgtgcatatcacaaccccttcattagtagacatcattgagcattaactgtgacttaattctagaaaaaaatatttttgagatacccattaagatatcacccctgacaaatataaaaagagaccttgagtttacttcattttaaataaatagactgtcttcatttcctaactctgtgaatctgacgcttcttatcaacaccccaaattactgtcaacaaattcaaaaccatctactgatgaatgagatgtttaggtccaattctgatatgccatgctcattctcatacagagaaatacctacactcttttaaatatagttgttattgctgtgacttgcacctactaaacaaatgtaaaaattcttacagttcaagaaataccagtgaagtgtatattattgccctcattacacaaaatgctcatggaaaacactctatcaattccaattatgttctggggggaaaaaaaaggaaactgaataaaaagcaatcccagaatatttgactgggctggttggttatagctgctgaacaatatgtaattgtaagaagtgtggcaaaatgataaaaataaactcagtatttgttaaagaaatgaaaacgtggcaataaaagattccggaaagcgatttagttttttgcattacttcttcattacttgattattttactgtttcatttctatttacctaccaagttgattcttttgcatctggattttgcacaattctttcaataatatacggttcagtggctataattacaggattgttaaagttcacattttactattcatcttgttatctctggtaatggaaggttggaataaatgcacataattacatggttggtcttaaattatttttatattgctcttgccaggatatactcgaaaagcagtatttattctctaatatttatttttggtggtagtggttttagcaaaataaaagtaataaatacataaatggactggtcccacgagcttactatctatggtttttttcaaattaattctaacccattcatctctctgagcctgctaggggcaggaggtgcttagagtctatggaagaaaaacgtcatgtttcagagctctggtaacaggaaaatgtccctcatgaggtactcatcatttgatctattattttatctatttgtagcagagtaactcagtaacctacagatctgtggaccaacttactaaataaggtgtcaaataagtttgatttcattctaaagcaatgccatgtcatgaaagtaaagtgaatttttttgtttgtattatactggaaatagtctcattgtactatatggcactcaaaacattttataaaaatcttagcactatcaactaaaaattaactcataagctcccgtaattaactgaacagatgactccctgttggccaaagggaccccagaaaagactgaagaactgagttcgtggccattgatggaagcgaggtcagaaacgcctcattacatgccctttatgttagagtttaggcacaactgaccagcattaacattaaaatagagatcataagattaactaaagggactcattgtgacactaaaataccacattctaaataagacctaaggccatgcaaagcaagggttaaggcatgctctgcaaaccgtaaaatctttttttaaaaaattaatcctgcataatgtggcttactttccaatctgactctggtataccctcacatggcagatagcagaccccttatcttgacttaagcatccctttgtattgacctcaagtctttagacaaagcttaactctttcaatcaattgccaactaaagtatctctaaaactcacccatgacttgtaagcccatgcttcaagatgtcccaccttttcaggccaaaccaatgtatacttttcatgtactgatttataattttacctacaattcctatctccccaaaatgtataaaaccaagctgtaacctgattactttggtaccaattatgcaagacttcttgggtttgcgttttcttgggctgcaccattcatattggctcagaataaacctctttaaaacattttacagaggctgatttttccatgaacagcagcatccaaaaaatccacaggatacatgtatcaagtatttattaagtacctacgatatgccaggcattgggctatatatgaaaaacagtgttatcagacatccacctagtgctcctgattaaaaaatggatgtgagctcattttacctttacggaggtccagagatttaaattacttgactagtccctcagcgagtcaggagaagaggggttaaaacctgattcctccagttatatagtcatttaatgttcttggacttaccagtacttttgagtttttgtgttttttttttttttttccttaaacacaaaactacacccccgcctccagctcccaccccctcccacacatatacccttttttcatagaacaaaatttggaataaatggactttaaatgaatgcattgttttgactctgcagggaaatgacatagagaaaataaggaatggatcgtacatgctcatgcactgtctggggcactcctgctgaagtctcaggagtgtctttggtttgttgtctgagacctgagagttaaaaagcagagtgccttttggaggaacacgtgtctctttccgcagcgggacgtgcacttgatacacatcagtgggcatgccatcagtgcctcgcagctcatctttctctttagggtggctgtgttgttcttccgatgactggcttgccctggagaaaaatactgcttaaatattaagattagattagttttcacacagccccattttaaccactaaatttaaatccctcagcaatctacttcccaaccttccctaggcataatattcagtttaataaatggtttgtatgccattatttctcatcaatatataaaaactaaaaggaattttaaaaatccatacatcttggttgagatgaaatttgacttgatgagaagagattattcttagaaatgtttctaattcccaatcaaggcattctatttcaaaatgtaggagcatggttgaaagaataaatctttagaaaataatgtatgagcatggttgaaagaagaaatctttagaaagtaatgtatataataatatacatatatgtatatatacttatatataagtgtatatgtaagtaatatatatctctcacaaatattgttttagtcatcatcatcatcatatacacgtgaatatatgtacatatatgtattatatatggtatatggtatatatgtgtatatatgcaagatatatatgagtatatatacatgtgggtgtgtgtgtgtgtgtatgtatatatatatatatatatatatatatatatatatatatatatatatatatacacatacatatgactccaaaaacaattcctctacaaattgtgtgtcacttccttgacccattacctccccaatgtatatatcatgtgaatatcaaacaattgaatgttttgttggtacaattggattcattcacacggaaacgtggagtctatttcttccttcaaatcctcatcctccaattaattagctgaaaaactgactgcatctctgattctctaagaagcatggaagagaaagaaatgggaaaccagctagcagctcattacatgaattcaaacagttccctttgaagggaaactttttcctggcatagatgatgtcattgatgagattgcaagggtaggcattgtataaagatgagatcctttttaattctgttttcaaaactataaagctaaaatttttagaattgaaatttcagttaacatgacccatgtattagataaaatgtctctttaaagcctgggagctctccaaggtgtggtgtgtttcctatttgctaggtacatgattacgatgcatatggatagatgtttctgaagtgtttccttctaagtgcactattgccagtcagatttacacccaagtagcaaagatgttaatgccatgcaatcctattaatctaacatgttgcttttgtggattagaactactcagactctaccttttagttgtagttattttaaatctttaatactgagctatcaaattttcttttatgatacaaagctactaagtagaagatacttgaatattccattggctgactgatgtgtttattaggcacttactctgtgcccaacacaatgataaacattctcagcaatatcgtgaaagtttaacacaggattcctggcttccagaaatatgatgtttacttaagaagagataggaacatatgtgaaaaagttaagcttcatgtagtatcttaagatgctaagtttagtattctggtggtggagtttcttatcaacaatgtttcacagaagatattgagctcagcttttcattatcaaagcaattgcatgaagaagaaatttgagaaagtacaacccctggtaatgattggagcctctgaaacttttgtaatgtcaatatccatagcatgactattttttatttccggtactgatgtggcagaagttgtggagtagtgtttttgagttatccgctgtttaggatcctgtattaaaagaagtatgtcggctgtgcatagtggctcatgcctgtaatcctagcactttgggaggccgaggcaggcagatcacctgaggtcaggagttcaagaccagcctggccaacatagcgaaactctgtctctactaaaaatacaaaaaaattagtcaagcatggtgtcgtgcacctgtaatcccagctactcaggaggctgaggcaggagaatcacttgaacccaggaggcagaggttgcagtgagccaagatagtgccaccgcactccagcctgggcaacagagctagactctgtctcaaaaaaagaaatatgtctcagtagtgcagttatccttctgtaggtttgtattggtgttcagcaagtatctggtaaattaatgaattaacaagagaatagtttctatgaagcagaaatgcatagcaaagaagtggggtgttgaaaggaacagctgggatatcagttatacaggttgaaatgtggcattggtacaatgacatattagttatactcttacaagttgtccttgagtgggtgcttgatagaagttggcttgcaaaccaaaaaaggttaaacacttgtcatggcctcaggctaatgaccccttctaatatgcaattctgtttttctcattctgagagcaaaccagatgccccatgatgtgcccactgttcttttgctaatgtgttcatcctcagtgccttcattaccagtttctttcatttgacatgcaaagatcttttttcttggctcatcccagagaagtggccgggcaagtgttctcctgagaaaatgttgatgactctggcacacagaccacatacaatttgctgcttcctcacattcacactgaagttggctaaggtgcccagagagaaaccctgagccctgactgcatccaaaaccagtcattagggatgaccaccgtgggatccctcctactgggtgcctggttaaaactgagtgtcagagaagagactggtggctttgtcattgactttcttgttcagatgtaagagcatcatcactgggagaaggaaatgtgaattgtgaaaataaataatgcagatagaagagtcggaagtacagaggagtgttcctagagtgctttatatggagctctattatggtgcataccatggtgtgttgttaagttagtttacgtgtcagtttcccctttacactgtgaaatttagcaaagcagagactatgtctgattcatctttattccaagtacctcacaaaggtaatgctagcgttgaccttaataagcatttaatcatgtttattcatttattttttgaatgaatggataatgattaaaattgaggtttttatctcttgattatggagcttaactcattgtgagcccattgacatcctgaaatacttgctgaatgagagaataaatgaacagatttaaaaaaaaaaaaaaaccctgaagagctaagcttaagccactatttaggctttgaagttgatccatgtggtcttttgttttggattgattgtagggactaaagaagtacttcatacgttgtgttatctttctgctcaggtcactgtggacgatagatagcctttacttctccgctttctcaattttcagccactggtattcaactgcaggccttctttaaaaatgtacctctttctttcaaaattttctgaaaagctagaatttttttgttttttgttttttccaggaaaaaattttaacttactggagaccaatttcttttcttaaacctgtctctgagctgagtatactgtatagtccctataatgattttggtaaatccttaagcataaggtggtcattgtgtgtgacggtgttttctgtttagtgaagacaaatggtgggatgagtctcctgctaggatgtgcagaaatgtgagcattagtctcaaggtacattccgtaaagtgttggtgccaggtgagtattgaggttgatagcttctgtgaggcctggtttcctggggttgtgcccatgttcatatgacagctgcttccacaataacatagcaggtgcgtagctcaggatttgcccactttctgcaagtggacactctcgcttgtatctaaaaggcctctcccatggtgccagaatgcctctgacagcattttcagagctgtgacggcaggactgtagctttatggtgggagcttctatctttgtaaatgccactgatgtcagctctcaccattaaccattttcttttgtcaaatgggagagattcaggactcatggaagtgagagactggcatgatgaggcaaacagggggcagtttaactggctgtttggccactttcccccactctaattctccttctcctttccataaaacatgctttccaatttctgccaataaaagcctttttaaaaaagtactagtctttcatttttttttttgcataccttgttgttattccttctgaaccagtagtaacacaatatacgaagtacattctcttgggtataaggccagtgtataggtgggaatcccatagacctaaaaagaaaaacaatctaggatttctggatgtgctctgaagtggcaccttctaagctgcagtatttgttcaacagtgtttttccaacaaaaaataggatgagttcacctgtgaagcatcctgaagggaaacaccggtgcactgggcagggaacaggagacctagatatacttcttcttttttttttttttttttggtagatatatttatttatttatttatttttattttattattattatactttaagttttagggtacatgtgcacagtgtgcaggttagttacatatgtatacatgtgccatgctggtgtgctgcacccattaactcgtcatttagcattagttatatctcctaatgctatccctcccccttccccccaccccacaacagttcccagagtgtgatgttccccttcctgtgtccatgtgttctcattgttcagttcccacctatgagtgagaacatgcggtgttcggttttctgtccttgcgatagtttactgaggatgatgatttccaatttcatccatgtccctacaaaggacatgaactcatccttttttatggccgcatagtattccatggtgtatatgtgccacattttcttaatccagtctatcattgttggacatttgggttggttccaagtctttggtattgtgaatagtgccgcaataaacatacgtgtgcatgtgtctttatagcagtatgatttataatcctttgggtatatacccagtaatgggatggctgggtcaaatggtaacaacaggtgctggagaggatgtggagaaataggaacacttttacactgttggtgggactgtaaactagttcaaccattgtggaagtcagtgtggcgattcctcagggatctagaactagacctagatatacttctaacataatctgtgactgtgtgcaggtcatgctaagtatgtcagactgccattttctccttgaggctggaagtgtggggagaaggggataatgtagttgagaatccattactggccccaccttggacagagagacaggcaggtaaagggtacacatgtgcctggatggtgctgctactggactcttgtttacattaatgtgtcaacagtgtgctccaaggttctattaggtgttaacaggtgtctcaagaaaaaaatgtttcttaatgagatcagtttgtaagaattctgggtgaacacgttaattagtttattcttttaatgcgttgaatgttttttttttttttgaaaaataatagaatcccttcagaattcttaatatgatatggtgttctgtatattttcaagaggagaggtatatagtgtttctcaaatttatttgcacatgaaatgcctgtgggacataatatctctgaaggccgatgttccttgaaagactgtgtgaaatattgaactatatgatctctgaaagttcttgaattctccattatcatcagaatacctggcccttccaagcccttgaccttcgtctgtggagtattgactctagctgccttccagacattgtcatctatgcttcttttcctctgaggacgatgaaccccggctgttctctcagtacccctgaaaaatgggaaattgtatttttttcttctttgtacccaggagtctatgtataatgcataattctcagtcaaaaggaacttgcttacttaagtgctcaaaggtttttgtcctgtggtttttgtaaggtaatcccacaacatccagataaacaaataatcacaagacataaccttccagagtgttccataacattgatcacaatcaaataatgaggcacgattccatgaaacattaggaaaattataaaggcatcaggcagaaaaccagcaactagcaaatggtttctccatgatgattttgggttcacatttcacttccatatataatacaacttatgtgcccatatttcatcctctggaagcctgccacattatcctctgaatgaatattaacactccttgtactctgaagtagcctctggtattctggtatttattcaacaggttttgaacaagattagtggattataattttggcttcaccacattttaaactgtgtgccttctctgtgcctcagttttctcctctgcaaaatggaacaatagaatccttttcattgagttattctgaggattaaatgagtgaatataggtaaagcacgtaggacatccctggcatatagcagtcaatcccttgtaaaatgttagctgcagtgggtgcaactgactgcggccagttgtcaccacctgtgacatttaccaagacaattttgggtaaaaaaggcagatttattggagaaagtacaaagataccttgcaagaaagcaatgcgcaggacaatgggctgtctaccaagaggcaggagctagagggaagttttatagggtcatactggaggggctatgtccagataagttgtgcagataaggtcctgctgctagggctatgtccagaaactaggtatttgggaacatgatgttctgtcagtcggttgtctgtgataagccatctcctctctcagaacaattgttctccccaatctggggccccttcttcattcttgcttatcttattaggactccacattaactattgttgttattatcatacacagactatctctgaaaggatatataagatatagataccagccataacctctgcaaaaagatacaaagagactagggagccggaaagcaaagatagaggagtaggcttacttttccctacatatgaatttactctattgaatattttaaaatcacctgtgttttaccatcaaaaaaataaaataaaacaagcatcaatatttacaaatgaagaactgaggttccaactttacgattgactttcctaattcaattggctatttgacttccctaatagttaagttagatttgagccagggatttgaactacaaaaaccgtgttttttctagtctaccaccttatatagagagatatgacagaggggagagatgagaggtgtgtgggtgggtgggtgagggtggaggaggtggtactggatattactgaaaaacttttgatgatattgaattctttccctgagttctgtagattttggcactggtctcttgtttcttctatttctactgtgagtaaacaaccattcccaatcctccagttctaacttgaatttcagtggactaggctgagtggatgtacaagggcaaacctgcatggggtgtagggaaatataaatagattggcactgtggaagtcagcatatgtttgcttggcacccaaccctcctatgcctttcatttgctgaatattaagcatctcatttttatctgtcctctttttgatggaatggacatgcaaatttttcaaacctacacaccctcttctttctcttggacaaagggagtaattttactatgaatccatcatgtgtcccaaggaggcaaactcaaaatttgtctgcaaaaagcctttcattcatttcttttcatgtaagaaacaaaattggcaactattttttcatagcttgtaaattccaagaaacttagtatcttttcttttcacttgctctgcagccaaaagcatattgttcagcattgcgaattcacaatactcactgctcctcagtcctggctacaacataattttgaaaagtttatgcagggaccatccgagtaataaatcacagaggaggactgctttaactgttcaccccttagctactgcctgaatgagctccatgctttatcatctcagaaggaagctgtctcaaatgcatgcttcattttattatccaattgtaacccatctagataaatttaacttcctatagatttgctgcctcttagtattcatatcttctccagacttttcattaatattatgatacttggataggagtattcccctccctttcctttataatgtaacagctttaaattgacatttggtgaatgtatcatcattgctattcaaattaggtcagtgtttttatttcattatgctggaagtcctcttagctgcgaaatcaagtttgaatgtctgttacctgaagcaatgcttctggcaaatgtttcttagaggtttttgcaagccagaaattgtcaggcacctcccccactcccacttcttatttctatgtggtttggttcatataaccatttaacatatttttataaagcggtagttgaatagagtataaaataggaaaaaattaatcatctgccctttaagaggtttctgtccactgtgtgggtgttggagagggaggtgggggaagagaggggaagggaggcagatatgcaaacaaaaatcatactatgccatggttttggtacagtcagttaatgtctaggatataatggaaacgtgggaaaaggagcctcttgacgtttactaagacttgagaatgagtttttttcttaataatctataaattgaaatccactctttctaaatgtgcctttggcactgttcttttgaattaggaaatacagaaaaacagttaaatttggttgaacgatacaggaagtactcagaaaaggcaaccatcttaccccaggagagatcaaaagacattcacagattatgttaacccaaagttttggcctcatttctcaaggaaggggctacatcttttagaccacaggcatttttccccagttttgaaactgtgaaggtgtttaggacctgagagattattaataacaggtttcaatgcctgacactcttggacttaaatgttcacctacactcaatctgatcatggacaaactacttaatctcactgagcccatgtcctcatccataaaatgagggtaataatagttccacgttttagtattgttaggatgattaaataaaataatgcatgtaagtaaaataacccagctattggaacaatcgctgctgtataataaaccatcaataattcttagcttttgctatcattcttgctactgttaattagttagtggttctcacttttttctagaaattgctctacctctgtttctcaactgagatattatagtttaagactttgattatgataactagatgataatttagatggtgtctttttttttattatactttaagttttagggtacatgtgcacattgtgcaggttagttacatatgtatacatgtgccatgctggtgtgctgcacccactaactcgtcatctagcattaggtatatctcccaatgctatccttccccccgcccccaccccaccacagtccccagagtgtgatattccccttcctgtgtccatgtgatctcattgttcaattcccacctatgagtgagaatatgtggtgtttggttttttgttcttgcgatagtttactgagaatgatgatttccaatttcatccatgtccctacaaaggacatgaactcatcattttttatggctgcatagtattccatggtgtatatgtgccacattttcttaatccagtctatcattgtagatggtgtcttgatcagcaatctatgctttgagtgttttttgttaagtggctaatgcagtttgcatatttgtcccactaaatctcaagttaaatgtaatcctcagtgttggaggtggggcctggtgggaggtgttagagtcatgggctgagcactcagacttgggcaccatccttgtgacagtgagtgagttctcacaaggtttggctgtttaaaagtgtgtggccatttacctatataacaaacctgcacatagtgtacatgtacccctgaacttaaaataaaagttggatatttttcaagtgggcttcatccctgggatgcaaggctggttaaacatacgcgaatcaataaatgtaacccagcatataaacagaaccaaagacaaaaaccacatgattatctcaatagatgcagaaaaggcgtttgacaaaattcaacagcccttcatgctaaaaactcaataaattaggtattgatgggacgtacctcaaaatcataagagctatctatggcaaacccacagccaatatcatactgaatgggcaaaaactggaagcattccctttgaaaactggcacaagacaaggatgtcctctctcaccactcctattcaacatggtgttggaaattctggccagggcaatcaggcaggagaaggaaataaagggtattcaattaggaaaagaggaagtcaaattgtccctgtttgcagatgacatgactgtatatctagaaagccccatcatctcagcccaaaatctccttacgctgagaggcaacttcagcaaagtctcaggatacaaaatcaatgtgcaaaaatcacaagcattcttatataccaataacagacaaacagagagccaaatcatgactgaaccactcacaattgcttcaaagagaataaaatacctaggaatccaacttacaagggatgtgaaggacctcttcaaggagaactacaaaccactgctcaatgaaataaaagaggatacaaacaaatggaagaacattccatgctcatgggtaggaagaatcaatatcgtgaaaatggccatactgcccaaggtaatttatagattcaatctcatccccatcaagctaccaatgactttcttcacagagttggaaaaaactactttaaagttcatatggaaccaaaaaggagcccacattgccaagtccatcctaagccaaaagaacaaagctggaggcatcacactacctgacttcaaactatactacaaggctacagtaaccaaaacagcatggtactggtaccaaaacagagatatagatcaatggaacagaacagagccctcagaaataatgccgcttatctacaaccatctgatctttgacaaacctgagaaaaacaagcaatggggaaaggattccctatttaataaatggtgctgggaaaactggctagccatatgtagaaagctgacactggaccacttccttacaccttatacaaaaattaattcaagatggattaaagacttaaatgttagacctaaaaccataaaaactctagaagaaaacctaggcaataccattcaggacataggcatgggcaaggacttcatgtctaaaacaccaaaagcaatggcaacaaaagacaaaattgacaaatgggatctaattaaactaaagagcttctgcacagcaaaagaaactaccatcagagtgaacaggcaacctatagaatgggagaaaatttttgcaatctactcatctgacaaagggctaatatccagaatctacaatgaactcaaacaaatttacaagaaaaaaacaaacaaccccatcaaaaagtgggcaaaggatatgaacagacacttctcaaaagaagacatttatgcagccaaaagaaacatgaaaaaatgctcatcatcactggccatcagagaaatgcaaatcaaaaccacaatgagataccatctcacaccagttagaatggcgatcattaaaaagttaggaaacaacagatgctagagaggatgtggagaaataggaacacttttacactgttggtgggactgtaaactagttcaaccattgtagaagtcagtgtggcgattcctcagggatctagaactagaaataccatttgacccaaccatcccattactgggtatatacctaaaggattataaatcatgttgctataaagacacatgcacatgtatattttattgcagcactattcacaagagcaaagacttggaaccaagccaaatgtccaacaatgatagactggattaagaaaatgtggcacatatacaccatggaatactatgcagccataaaaaaggatgagttcatgtcctttgtagcgacatggatgaagctggaaaccatcattctcagcaaactctcacaaagacaaaaaccaaacaccgcatgttctcactcataggtgggaattgaacaatgagaacacttggacacaggaaggggaacatcacacactggggcctgttgtggggtggggggaggggggagggatagcattaggagatatagctaatgtaaatgacgagttaatgggtgcagcacaccaacatggcacatgtatacatatgtaacaaacctgcacgttgtgcacatgtaccctaaaacttaaagtataataaaaaaaaaagtaggatattttttaaaaagtgtgtggcgtcttcccccttattctctcttgctcctcctcttgtcatgaaatgcaccagctcccccttcaccttctgccatgagtaaaagatccctgaggcctctccaaaacctgagcagatgccagcatcatgtttattcagcctgcagaaccaactacacatctttaaaaaaaataaattacccagtctcaggtattcctttatagcaatgcaagaatggcctaacacagtggctttttttttcttttaagtatattttatatttagatgctactattagcagatgatttgtgcgtatgtcttgccctgttcagctttgaggagtccaggcccttatgggactccttctgagagtggggttcctattttccttaggaacccaagacagttctttcagaggatttcattgatctgttgccccatggtgctttgtggcacataatgacaaagcatgacaggcaggctcacagccctcgactcatgctagatctcggttcattctgtatccagggactccagttcatcatatcccttacccaggcctctctcctagctatgtctgtgtggctcacagatactctagagggagaggcaattaatttctttttggcggtgagatggtttgcctgggtccccactccaatcttatcttgaattgtagctcccataatgcccgaatgttgtaggagggacccagtgggaggtaattgaatcatggagatgggaattcatgttctgttgtcatgatagtaagtctcacgagatctggcggttttataaatgagagttcccttgcacatgctctcttgcctgcaaccacgtaggttatgcctttcttctccttagccttctgccatgattgtgaggcctctccagctatgtggaactgtgagtcaattaaacctctttttctttataaattacctagtctcaggtatgtctttattagcagcatgagaactgactaatgcagggggttatttcatgtcagacattgtcgtaagttgtgtcttccttggtgtcttagttttttctgtgctgctataacagaatacctgagactgggtaatttgtaaagaacagagatttatttcttatagttctagaggctgagaagtccagatcagttgggtggcatctggcaaaggctttcttgctgttttgttctatgatgaaaggtggaaaacaagagagagaacaaaaggtgtctaaatttggttttatagcagatccattccttgataaccaacaaactcccaggatgataatattaatccattcatgacggcagagcccttgtgacctagtcaccacttaatgctcccacctctcaccactgttgcattggggattaggtttccaatacatacctttatggaacacattcaaaccatagcatttggcaaataacccaaacccttctttcctcatctgataattgggaaaataatagcaactaccttgtggatactttgtgagaatcccatgcttcatgcaataaggacttaataattgtaagttgttaaattgtcatacatgctccttttagttatgaaaacctgtggcttttgtctaagagttgaatatgagaaggttcaaggactagggcttttatccttggatctctgtagcatgctgaattaatgaaaggtctgtctctctctctctgattaatcaaaaactctgactagtactagtgaaagtcaggtttgaacaattctgtgaagaatggatttggaaggaaaatatgaggcaagaattttaaaaagttgtttctgagttgaatttgatttacatttgctaactggaaaaagatcagggtataatcagtccataatattgaaagcagtttggaaataccattgcagatacaggtaatttaaaaaatctacatgaattaggtccaggagcggtggctcacgcctgtaatcccagcgctttgggaggccgaggctggtggatcacgaggtcaggagatccagaccatcctggctaacacagtgaaaccccgtctctactaagaatacaaaaaattaggcgggcgcggtggcgggcacctgtagtcccagctactcgggaggctgaggcaggagaatggcatgaacccaggaggtggaacttgcagtgagtagagatcgcgccactgcactccagcctgggcagcagagcgagactctgtctcaaaaaaaaaaaaaaaaacctacatgaattattcttcctgtgacatatttgtcattcttcatctctcctttaacattcctatcttcatccttcaggccatcctctgcctacctctttctgctgctacagtgtaagttgaatcatactttccaaaatatgtaaatgaaagtcagaagtaaggcaactcatagtgtttcagtgactttgatttcaatctcactcaagactgggagattctcctaaattctagcaaacttgtgcctctttcccagccttataagaaactgtccttctatctaaatactggaatgccactatgtgaagcttcaaatcagggtggttattctgagacaatggcagcttcttgggatgtggtgtaacatgtactaaatcattatgtgcacatacatttatttttaatcaacctgcgtttacctgagtgctgtggtttgaatgtgtcccctaaagttcatatattggagacttaatcctcaaggcaacagtgttggtgtatggggcctgataagaggtgattaggtcatgagggctctgccttcatgattgaattaatgtcattatcacaggagtgggttagttagcacgagagtggcttgttctaaaaggaagttcagccccctcttcctctcttgccctttgcctttggtcatgggatgaggcagcaaggagtcccttgccagttgtaggcccttcgaccttggacttcccaggctccagaatttcgaagaagtaaggctctgttctttgtaaattatccaggctcagatattctgttatagcagcactaatggacttagtcaccaactaaatgtaatggacaagaatggcctacattaaaaaaaaaatgtgattagaggatcttaatatcttattctgtagtgaactttagaatattttagacactggagattttctatcagatgtatcctgtggattcaataggattcattttgagaggcagctttctgaagtggaaataattctgtactccaggcacagtaattgggttcaagccccagctctgccatttactgggatggggagaaactcttggacagcctgttaggcctttttggcttccacttttcttgtctttaaaataaagttaataattttcattctgcttcactcatggcatagatgtgaggctcaaataaaaaaatattttggaaactaccctgaaaactgtagaacattctacaaatattatctaacaaaatatatgaatgcataattagtgtcttcaagggatgtcataaatatcgtaaaactaaagggtgagctgtatcaaaacttggaagggattgggatgaaaatcaaactgtctaaaatagaatggccaaatacattgggacttggctccagaaagaattaatgagaattacacagattcatatcttctccattattccattggtcacgtctaataacttgccatgaaattgcattgatttctacaaagtgattgcatatgctgttgcctcttttcaactgcacatgtcataattcatccatccagatcagtattttacttttaggaaaagagagatgctaactttttctcagaggagagtgtttagaagtctatgttctatagtccctcctagagaggggggatttcttcagtactcagcagctaatcttttttttcttctctctctttttccttttttattatactttaagttctgagatacatgtgcagaatgtgcaggtttgttatgtaggtatacatgtgccatggtggtttgctgcacccatcaacccatcatctacatgaggaatttctcctaatgctctccctcccctaacccccacactccccaacaggtcctggtgtgtgatgttcccctccctgtgtccatgttttctcattgttcaactcccacttatgagtgagaacatgtggtatttggttttctgttcttgtgttagtttgctgagaatgatgatttccagcttcatccatgtccctgcgaagtacacgaactcatccttttttatggctgcaaaatattccatggtgtatataccacattttctttatccagtctgtcatcagtaggcatttgggtttgttccaagtctttgctattgtgaacagtgctgcaataaacatacatgtgcttgtgtctttatagtaggatgatttataatcctttgggtatatacccagtaatgggactgctgggtcaaatgttatttctggttctagatccttgaagaatcgccacactgccaacaaacatatgaaaaaagctcatcatcattggtcgttagagaaatgcaaatcaaaaccacaatgagataccatctcatgccagttaggatggggatcattaaaaagtcaggaaatggccaggtgtggtggctcatgcctgtaatcccagcattttgggaggccgaggcaggcagatcatgaggtcaggagatcgagaccagcctggctaacatgatgaaaccctgtctttactaaaaatacaaaaattagctgggtgtggtggcatgcacctgtagtcccagctacttgggagtctgaggcaggagaattgcttgaacccaagaggcagaggttgcagtgagccaagatcctgccactgcactctaggctgggtgacagagtgaggctccatctcaaaaaaaaaaaaaaaaaaaaaaattcaggaaacaacaggtgctggagaggatgtggagaaataggaacgcttttatactgttggtgggagtgtaaattagtgaaaccattgtggaagtcagcaggtaatctttttacggtctgagtaatgaggaacctggctaatagttgccattctagatagcattaagggtgaagtctttgctcacagaagttggtgtatccagacagacattgtaattacagcagagcaaattaccatactctgaaagagaagaacacagaaagcaacaaacacatttaaagaagactgtcccagaaataaggagaagggcaagaaatctaagcagaatattccacttgccatttacagcatagacaaggacagcaaaatggaaagtcacttatataactgcaggataaagagatgggtgagatgaaatatactttctccgaatgaagttcactgtatgtgtagtggattaaatgagattgactatttttaaaaagcctgttacaaagaagaacaaatttaatagactattaagaggtaaagaggaacttttaaaagcacatattgattaaaacaaaagttatacactttgggaggccgaggcgggcggatcatgaggtcagaagatcgagaccatcctggctaacacggtgaaaccctggctctactaaaaatacaaaaaaattaaccgggcgtggtggcgggcgcctatagtcccagctactcgggaggctgaggcaggagaatggcgtgaacccaggaggcagagcttgcagtgagcccagattgctgccactgcactccagcctgggtgacagggcgagactgtctcaaaaaaacaaaaacaaaaacaaaagttatagttcagaatatttattgcatacaactcagcaaacaaagttgacctagatacaagagtattattggaatttgttagtgaatacattgacaaaattctgttatttttgtttaattatcactaggtccagtagggtggaagtcagaaattttgacttaaaatatcagctaattgaattagttatttcaaatcaatgtctagtttggataagaatattttataaaaaaacaaatcatagtattaggcatagtttatgcttggtggcatgtagagaaatataaaaataaaagatagtgaaatctttttaaaaattgtgttgaaaggtataatcatttgtgttaatgtattattcaaccaggatgtaggaagaacacacatgtcactgagctttgttctggggctggaaggaagtgcaaataacaatgatgataataataacagcagtagctaatatttatcagatatagagcttgttaccaccacagtaagcaatttgcatggagtatctcagttctcgtgattagtcaggtacacttcttacattggtttttcggattgagatattaaagtccttagaattgaaagaacttgctccaaatcatacagctaggaatggtagactagcgtttttactcaggcagtctcaagataacatttgttgagggtctattaacaaccaggcattgagatggtgtttacacatattagttatctcagtggttcttaacctgggatgcatgttaaacttaccaaggaagcattttaaaaccctgatgcttaggacctacaccaggtgaattaaatcagaaccttttgagacaggggcaggacttggcatcagtatttcttaaatataaacattgtatatgtaaatattatatcaataccagtatttttaaaagtatcccaggggagtcagccttttgaattactgtccatttaatattcaaagcaaagtctatacatttgtattattcctattttatttatgaggactctgagattcagtgacgataactgacttgctcgatcaaggtcacttacctggtaaattgctgagctgggatgtaaatgcagttctgtctagctaaagagcccgcattcttcttgatgcctcagtgtctagccattttacccagagcaataaattcacttgttcctgttatttagtgtttatcatagaatttagctttagcctcaatttcattttattgtcttcactattgagtactcacaaagggagccagttaacaacatctttggaacaaccatcctgtgtggagcattgtgctaattgctgtgggaaagaacaggggaagatatgaaatattccctttacaaagatatctactgttctgccagggttcataactttgggcctgtgacttgacatctgggtggcaaaagaagtctcatgaattgtttgggaagtattcatagttttcatcagattgtaacagagccatgagccaaaatatttatgaacttctgccttgcttggtatgtaaggcatttgattccagaagcagtggcatattatcttgaattttcttcataaaggcaaaacagtgccttttcaagagattttgagtttgatatactgtcaaaaactgtttacagctaagcctagtaaaagatgttgcatatgtggagtgtgtgtgtgtataaaaaaaatgcaggctgtgaggccgggcgtggtggctcacgcctgtaatcccagcactttgggaggccgagatgggcagatcatgaggtcaggagatcaaggccatcctggctaacatggtgaaaccccatctctactaaaaatacaaaaaaattagccaggcgtggtggtgggcgcctgtagtcccagctactccggaggctgagtcaggagaatggcgtgaacccgggaggcagagcttgcagtgagtggagatcatgccactgcactccccgctgggtgacagagctagactccatctcaaaaaaaaaaaaaaatgcaggctgtgaatataaaacaatgaaataaatttcattagtggctcagaaactagatctgagaacaaggatttggttgtttctggcaataaaacattattaagaaatgtgatatcatgaggtaaatatcttaaagaattgtattcatttacacacatatatgtacaaataaatttgcacacatatatacatgctatgcacatatatactatatatacacatgtatgtattatatgcatgcaccaatacatgctggcatgttttatgcaaattgatttttattccatagctatttttcctatataatccattatttttaaatgtattaataattttaatatcaccataaactgaaatgagtaaagaggcctgtaatgtgaatattcatatatggaacataatacgggggttgcgtaattataggtccatatatgtattgtatttcctgatatatttatatatgaaattgctagtatgtgtgaaagatatctacatatattttactaataagagatatattcatatatatatatacaaatatatgctttatagagcctaagtttggggtggaacaaatgttctcacccttgtttgattatgagaaccacttgcagagctttttaaaaacctgagtcccttttacccttgattcaaattcagtacatccagagcgggtcctggtgctgtttttaaaacattccttgaatggttgtgttgctttgcttgagaagcagccctgtagtttgtgtacaggtaggaatgaggaaggaagggtaccagacaacagacaggtaagacagtcaaggggaagaggccaggaaaatttctaccaggagggtggcagtttattgatttgcttatgttaaaatagttgagtccgcgctgtatctttttacttgattaatttaatttacacaaaccaaaggtcaatatcaatgattaatgtcagagggaagggtattattattatttttaaccctacttctttttcaactactacatatctgaccttgcagaggaaatcttggagagaaaatagccactttcatacgactatcccttggtcaatgcgctacttattaaactttattttcccactgaagaaagaaaatcctaccttcagggaataaaatagagattcattttctgacctcctagtataatgctaaaggaaaagcatacaatctctttggggagggagctgttaggaaggccagaggcagctgtcttggaaacatacagaaaggtgctattgggacagagcataatttaaagtaggtgagattggaaaatagggatttttccttctcttttacatttttttttcctttcttgaacatatacagttcttcagttaagtgttagcctgagattaaatataacatttatgaagctcctttcaaaactcatccctgcatgtgaatggaccatttcctcctttataccactgcactgacttctaattacatgcatctttcatgaaaatgtttgtcagactgtctgatgttaaattgcaagataattgataacaagacccatgtcttaatcatctttgttggtgctaaatacgtgtttattgaatgaatgaacaaacacttggatgaataaatagactgtaattgttagtaactccatgagacctgcacatttctttgttattggcactttgcctccctgtttctcttgagcttcatggttctatatctacatcacaggtagtctagtgtaaggttgaataacaacactcaaattaaaaagtaaaaatcttaagatgcttttggtacctaagcataatcataaaacaatggtcttgtttaatttgaggaggagataagtgatcaaacccaagaatccataaatttggcctaagtattggtatttatttccagagatgggcaaggaaagagtgttggaagaaaatacaaggtaagttttacaacctgtgagtactcagaacctggactttcatgtcttttagaaagacacattgacaataggcagaaaatccttagctacaactcactggctgaaagcttggtcagttaaattgtgaatttacatggaatccaaatgaagtgttcagacatttcaaacatctcttgcttaatgaggttctgtgcctggctagcaggtcagcagtctgatttcagtttacagatgcagtcttaaaaaaggaccctgagatcatctataacacttccctgtcttcctttgctccagctgcattcatcagcttccatcagggttcacagcaatgaaattaattgacaagaagctcaatcttaagagcactctgaactgtatactcttgccatccacccgctaactccaatcctacatgaatgaatgcaagtgtagttttttgagaaggggccatggctcaagcagtgccatatatgtgccttctatacaactggcttggtatctggtaaaatttccattgcccagttacaaactagccagtcccttgcagacctaggatcctcttagaatgccctatcaggaagttctttgcaagatgttttaactgagcaatgaatttatagaggaggacttgaataaattgtttcaaaaatgaaaccatttgaacacaaatcatgtctttcactaagacccagacaaactaactcatatgtactccacacatctcagtgtagtaagcagatggaaaatattcattgttttttttttttaccaatgagacactagtaacaaagagaaagtgtagaaattcttcaagatccctagaggctgggcaatcatatttctagcaaaactcttgactttcttcctgttctcaacctctgccattaaaataaggaaatagtgctatcaaagtaaaagagaagcatctgttggaggggttcaagggggttgagtctttaggcatcaaagctaggagttggctgggcgtggttgttcatgcctgtaatcccagcactttggaaggccaagtcaggcagatcacctgaggtcaggagttcaagaccagcctggccaaaatggtgaaaccctgtctctactaaaaatacaaaaattagtcaggcatggtggtacatgcctgtagtcccagctactcggtacactgaggcaggagaatcacttgaacctgggaagtggagttgcagtgagccaagattgtgccactgcactccagcctgggctactgagtgagactccatctcaaaaaaaaaaaaaaaaaaagaagaagaaaaaaaaaaagctgggagtttcattattcctcaaagaaggcacctcagaccaggttccatagggcacgcccctaaagagcccaaccttctcagggttctaaaatgtatcttaagcccaagcaaaatccttgactttccatttagatgccaatatgccatcctcataatattcattctcatggaattttgagttcccacactcttacatagctcccaaagccaacttattttactgctgaaaaatacttcagtacacttttattgctgacactggtttctctatacttcccccagagatattcatgttataagtaaatctttttccaaggtgtgcttcatctcctggctggaagcaagaaaaaaaatgttcaaagtattgtagcactttttacagagtgtgtatcatgaaatcaataatcatttattgagtactgactattcactgtggggccagatattgagaatattggagagcaattagatgtggtctctgactccaggggtctacaaacggcatggtggggaacaagctcattagatgaggagaaaaaataataatataagtgagtataaactcaagaactataattatgcattgattaatgaaacaaatactgaagatttactttttaaaaagcgttgtgctcaaggctatggcagatgtaagtttataatatgaccacttacattaatttgctaggtttgccctgacaaattgtgaaaaactgtggctgaaaacattggaaaatcagtttctcccagttcgggagaatagaaggccaaaatcaaggtgctgacagtgctatgctacctctgaaggctctaggggagaattcttccttgccttttcctagcttctggtggcggccatcaattctgggctttccttggcttttagcagcgtcactccagtccctgtttctgtggttgcaaggccttcttccctgtgcatatgtgtgtgtgagtgcatgtgtgcatgtgcacctgtgtgtgctcctgtctttacgtgacctgatacgaacactagtcttttatttggaacccaccctaatccaatatgacctcatttaaactaattgtatctacaacgattctatttgcaagtaatatcacattctgaggttccagggggacattgttcaacccagcacaacccttaaatatcctattgtcttgttggaggttattttatgggattcatttttggtgttccatggcttttcagaggaggctcagtgtccactgatagtctctgggaagactacgtaggcataggtccgaccattgctatattttcttatatctatgaaatcctaagttaacattttaaactacagtctactgtgtgtcaagtgttgtcctaggctcttatttacttaattcaatcttatcctcacaacagcctttgcagtatgattttttccattgtatagatgggaaactagttcagaaagtttacttacttacatgagacttataagctaggcgctgggatgctaaacaaattagttccaaagtctactattcaggctgaacttatgcatttctggtggtgaaagcacagcctacataaccattagtttgtgatttagaccttagcccaaacattcgtcattatcatatttgaagccaggatggacccattgttccagatctatatactgtatatcagttagccatatcaattaataatcttttgatacttgtcaaagagcagagaaccgcagaaattaagagtttattctcttcattaaaccattaaagattggaggtggctattgtgaattgggcatgaattatagcataagcctatatatgttgcatatagccccccgtaacaagcctccttgttgtcttttgtgttcctaacttatgagcagggcagagattatcactgaacacattgcagggtaaatgtaggactctgagtcacccattggatttttacaggctgaaacatttacagtgtcctgcttacaattctcaagcatcagttaggtgcaggaacacacaggcagagtcagtagctgcccagggaactagtgtccagtctaatctcttcacaaactttgtgcgtgattcaggaaggattattacaggccaaattttacccatggacctgttttgtttagtaaaatattttcaaaaataaattttggatttgaatgactttagggaaggcaggaatgatctaggctctcacaagccttagtcattacccctggcctgaattacatatttatgtgagccctctagtccctggaagcagttctgtttgtcaccctgtacttagaaaagtggaaattaatgtatggttcctggacaggcagcaccagcatcaccagggaactttttagaagtgcaaatcctctagtcccacaccagacttactgactcagaaactctgacgtggggcctgtaatctgtgttttaacaagccttctggttgattctgatgtgcattgtcctaggagaaccactgacttagagataagttaagaaactcttcctttcttgaagaatagcgtcttctgctttctaataatgaacttttctgtaatgcctcaagatctacaaagatgtcttattttgcttccagagtcacgtgagaaaacagtaacaatttgagggaggtgttgctctttcagctttatccagagatgtgcggtggcttgttccaggtgttatatgacaggacaatggacctcaaactcaagattctttttcctctacacttcactactttaactctcctgattattttgtggactgatgaataagtacgtgtaaactgattttagttttcctggtaatgaaaaaaaaaaaaaacaatgagtattgttactcttgtaataatcacatcattttttgtctttctttctttttctcattttatttttagacagggtcttgctctgtcacccaggctggagtgcagtggcatgatcacagctcactgaagcttcgaattcccgggtttaagcagtcctcccacctcagcttaccaaggagctaggactacaggcatgtgctgcaacacctggctattttaattttttattttatttttttttatttttgtagagacagggtctccctgtgttgctcaggctggcctagaactccctgggctcaagtgatcctcccaccttggcctcccaaagtgctgggattacaggcgtgagccacttcacccagcctttttttctgtgtctaaaattcagttactctctcattcacttaacagtttagaaaatactaactatacaacatgtactacgctagatgattttttaacttaaaaatgtgcaatgcacatgcatattcataataaaaatccatctttctaactcctgagaggtaagcaaaaacttattttactgctgtaaaaatcacataattggggacaaaaacttgcatgtaatatattttctatgagactgtattgactttgagagtggttagagttaatggtttgaattagcataagtaaaattaatgatattgtaggtcttaaatgtaaatgcaattttacaccaggcccagaagaaattcccctcacctaccttaattggtcagatgaaaatatttggaagaaatacctcattcaattttttaaaagcatattggctacttgccaccattgaagaattagatctcaaactaaagggattgtcgggatgggcttaaacagccttttgatttgttcattaattcatcaattcaacctctcacaaaacaattgtatgttgaatgactgctaggtgctgtgtgctatgctaggtgctgctgatacagttatgagcaagacagactcagaatcttataaatctttttgtacaaaagacaaacaattatttcagtgagttgattaaatttaatattaatatttaataaagcagaagtaattatacctgcaaaggaaaaataaagtgtgtttttagcacctataatttgaggactgtgggatggtagggttatctgaaaagagataaataatttgttgtatatttgtttcttttggggggtgaatgccatgtgccatgatgtgggaattaattggaaaaccataggctatgggagtcagaagagacattagaggctctaatatctgtcccacttttctctaatttagaaatctggaggctgggacccagaaaaggtaaaatgaattaccccaaagccacacttagtgaatgaaagatgtgtgaacggacatatgcatgggcctccttaatcctatgctagggatgaggacatgcctttcccaaaaataggtgaaattaccatatgataaagaacatttttagatattgggagtagggtagggtacaaggctttggaacagcaaagttaatcagctcagtagggggaaggaaaaaggaagagagaaagagcaggacctccagtggaacaagagtctgtggactctgtcaccctgttactccctcttaatcactcagatgatttgctttttctgcttctatttcaaaataagctgctaaaactgagatgcagtgcagtgaaagcacatcatgatctatgttctcatttttgcatggagggagtgagtaaagacctcctacttaggtagtcatcttgctgtccctgcatgtagactaaggctgtgagagagaacttggtgctttataaggcattccctgtgctggtataaatttgacccttgcatgtgagtgatggtgagggacatctctgagaattgttcctggtacaacatgtgtggatttcaacatgggtactgcatgctggagagatcttgatatgacccaaaagcaagaccagaggcaagcttgacacgatggagcaaagggtggaaaggtagaaaatagaatgaaaaatttttctttgctgtcacctcctcgattttattcaaatcttaacccaaacaactagattgcattactgggctcttaaaagttttgttggaaaagtgctgctaaagaataggaagacaatctaggcaatgccattcaggccataggcacggacaaagagttcatgaggcagacaccaaaagcgattacaacagcagcaaacactgacaaatgagatctaattaaactaaagagcttttgcacagcaaaagaaactatcaacagagtaaagagacaacctacacaacgggagagaatgtttgcacactgagcatccaacaaacgtctaacacccagcctctataaggaacttcaacaaatttacaagagtaggatctcataggtttatttacaataataattcaaatgtttcagatttgtaattgtcctttgaaaccattgctttcctttaattccagctataccaaagactctttggaatgggtaaattatttctacttgatagactaggaaagtgagtcacaaaaaggctcgcccagagctactggttattagttgtgtgtttttctctcctattccacactcgagaaaaccccgaagaatagggggtggttaatggtaaaaagaaatctagaagaagagttctggaaatgaaagacagctaggttttgagtttctctaagaaaaggtagggggcaatggatttaaactaggggcatacactgcgattaaatatcgaaagaaacacactgagatttaaaaatgtataaagggcttatgggaacgaagaactaaaaagaaaatatgaggcaagaacatagggtggcgacagaacaaggctgtgagacgtgtgcttggtttgtttaggctttaaaacttgtcaaagtttaccgttttctctttcaagagggatgaaagaaaggatggtgcttcccttagtttgtttgctttcttctttcatgtatctgccctggcagatatgcatacatgtgcaggcccgtgtgttcgtgcacacatatgcacacagataaagtgggaacagagagaagccagtgggtggtggtgagagatgggggcagaattgatgcatcagggggcctaaatccatgcaatgatcaagttcatagcaatttccccaggagactgtatcatattccagtgaaggggagtacggcaggaggttgccatggcaacaaaaggcctgaaatattaactctgactagcaacaggccagtgaaacagcctagctaggatttatggcacattatagtgtgaaaagcaggagaaaattactgtaaaggcaggaattatagcacaacagaacatataaactcccaaatccgtcttcctaattaaaacagcatgctcggaggtagagcacatagtaaggccattagcttaaatggggatgtgctatcatcgctttgttatcaagtttaatgtccttaagactaactgtgtgcactgggagagtgagagcaagggtaagatagtctggagacagatggaagcaagactcttgggcacttgaattcttctcaaactcattcttggtgacataaggtttcttcagatactagtctctgatcccacaggagattctagaagatgccttgatccttctatttgtaaataaatcatcacttctcaggcatgaaggctgagagactgataccacagtcaatccctctggaacccaccaggaagagaggagcaactaatcaatgaggtttattgttgaggaaaaaggatcttggatctcccgactccctagaggggaaaataactcccttgttgtcacagacccaaactttcttttatgtcttagtcaacagcctgcccctaagtgtttgaatttgcaatgcctggaggaagtcttccatgtaattcatactttatgagggaacctttgtcttcttgtgattcttattagaaactcccaatttctcgaactctaatccaggaccttagtactcagtctggagatgggtcagggaaaatgagaaaaccattattttacaagggttcattgttcatcctttattctgccagccattcaacaagtatttaatgaataccttctacattctagtaaatgctgggaacatgtccatgaacattaaacaaacgcacaaataattacttaataaacagttaaatatacaaaagaaagtacagaatgttttgaaaattatgaaaattcttcccatagcactatctttatttccctatcaccatagttgccaaagtgcccccacctgacattcttttaggtttgccagatgaccaagccctacattcccacagctatgtcagcaacatactcaagatcatcctttagacattgcattcccctcccctcccctcccatcctctcccctcctctcccctcttctcccctcctctcctctcctctcctcctctctttcttgagacagggtcttgctctgtcacccaggctgcagtacagtgattcaatcctggctcactccaacttctgcctcctgggctcagatccttccacctcagcctcctgagtagctgggatcacagttgcatgccacagtgcctggctaatttttttttctcttttgtagagatggggtttcaccatgttgcccagctggtctagatctcctaggctcaagcaattcaccctcctcggcctcttaaagtgctgggattacaggcatcagccactacttctggcctgtgtttttcttttttaaagataagacctaaagaggattttgactattttgaaaatatattcatatctgtgtatttttggttattcacttccaggtcctaaagttgcaattaaggagaaaaaaatcattgattattcttagtagttttgatgaggtaatgcaaggtttttctgtagcaaagtcagcatgcgtcgtgaatatggttaagctatgtatgattaaaggattatttatgttttatttataagtatttgctatcaataacagctcccaaaagtaagattcaccagtattactacagcatatgggacttttgctgtagattaataatgccatgatattttctttaatgaaggtggaaatgattgctttattttaacaaagggacctctatggtccccctgagtttgagccttgaatgtagacgatcagggatgctatatcacagctgtctccctgctgataatgactctccttggggtttcataatttctgcctgaaatcctttggtttcctctcaggaggcatggagtgaatttatagggagattcttcaatccagacacaaaaaaaggttttaaaattttttgtgtgtctccatatttgactttctgtctcccattctcatttcctttactttcatgtgtgtgttttcttcttactgtgccaaacacataataaatgctcagtatttgagattaatagatataatcattattattttgtgttattctttctactcctcccttataaaaaaagggattcctcccttcatcatgcttcccatgccttcatatacttcttattggtttgcagaacaggcatagttatgatggagaaagtaaagaataatgattaaaaagaataataacaaaccacataactaactgtttgggtttaaatgacagaactctcaaatccatcttcctaattaaaacagcatgctcagggatagagcacatagtaaggcttttagcttaaatggggatgtgctatcagtgctttgatatcaagtttaatgtccttaagattagctgtatgtgccttgggagagtgagatcaagggtaagatagtctggagacagatggaagcaagattcttgggcagttgaatccttctcaaactcattcttggtgagtactgtcactttctaggtgtgccttaggcaagttatttaactgcttcgtgccccagagagtggtgggggaatcaagggtaggacacatgtgagtcactcagaacagtgcctagtctttagtgaatggaacttcgggtgttcattattgttgatattgcaggtgtaaagaatttgattcacacactcctatcatggattggagggaagttgaatattggttcatatcttgttttaggttctggtttacttgctgcctgaactaggaatataattcgggatttgcagctagtaagttgaaattaagaagaactcaggcctttagattaatcaagtacatatacagtattgaaattatgtctttttatcagtatctttccagaggcccagttaggggagctcctggcatgtgcccggcatgtaaggagtgtccacaagtgtttgcagacctgcactgaacactatttctcttttgatatgatgcagtttaacatactcaaaagagttgagccttatcccctttgctcctcaaaaccaaacacagccagttttggattaacttttattcagtcatgttttatgctgtagggtccaacctaaattttctaggacgcagcccaactaactgaattctttatgtcacttgaaggataacgtcactacagttaattttgataataacatggtttgaaggattcctaactgcttgcaatttatgtaatattctcagtgctctgtgaatttgtagtctgatgaaaacactgaaaagggaggtaatgtttactatttctgattattattctgtatccctcatgcagacctaacctcaagcatttgcagccacccaatgactttttttgaaggaatttttactagtgggttcatctggggcagatgaaaatgtttgcattttagacactccaaatacagatataaaaactttatgtctcctcctccagctctaccttcaactttcttttcactttctttcctactaagagcacatatttccaggctcattcttcatccctaaactctgtccctctccttactcctttgttccgtcttttgtcctctccctggaatttctggtcatttgcattaactacacttataagtcaaactttctttgttcctttgtgggtgtactcagaacatcattacattcaagtaaattcatgtgttttttttctttttttgcccttttatttaaaagcactcctactggccattagaatagttaccagaaatctcctttggtctatggataagaaattctgcagaacttttcaaccaagtaattagatcatattatgtctaaactggtgcctttttctcaactgaatccaagtaggagtatagactgttaacaccttcaactgagtaaactgcaatctttgcaaagtgaattaatatatgaatgcttgctaaggcaagataacacatttttcaattaacaaagtaacaggagctcagggtagcatgtgatatatatatatattctgctacatacatatgcaggtatatttttcaatcaacaaaacaggagctcagggtagcagactacagatatacatgtgtgtatatgtgtatatatatatgtagcatactacatatgtatacatgtgcacatgtacatatttatctgtgtatatgtatacattatgtatatacatatataggtatatgtatacatatatgcatatgtaggtatatgtatacatatacatatataggaatcctatatatgtagtctgctacacatatatattcacatatatatacatgtatatatgtagtctgttgtcctgagctcctgttgtttgtcaattgaaaaatgtgttaccctgtcttagcaagtgtgtgtgtgtgtgtgtgtctatatatatatatatatatatatatatcctcaaaattttacctagagtaaaaaaatgaaatgcctacattacataaagacccatatgacaatattaattctgtgagctgagacatattcatgccaattctccataccttctcccccattgcccattctccagccctttgttgttcactggtcctaactctgctttcttactacaatggcccacttactgcatccttagtttttgacattttgaaatcacaaggttctcatattaagcatggacattttctttacttttttattaattacaaccacagaacttctctcgtcccactccttcttgttttgtctttgggtaaaaggaataaattatatatttatcataaattttaactctacaaaatggccatatttatactttcttcagatttctctcagttctagttaaggtttttttttggcttccatttgccccttatttgattattatactccaagtggctgaagaaaaaatacattcaatataatctgtctgtaattttcatgtcttcctcattaccgtaaaatataatgcttatttgagacacacacacacgcacacacacacgtgcatactcttggcctagatcaaccacacagattcatttattttaccttctcattaattagaccctcaagcctcttaatgttgttttaacactaatttgttgagttctttctggcaccaaactaccccaaactccatgaagaactgaatcatcaatgtattatttataggggcttctttcgtgtgttcgtttaaaatgtagttatctaattaatttattaatttatattgtcaataactattcccagaaggttttttttttttcagatctactagagaacttaaagctttttcttttccaggaatggccaaaatatccagaaggacaatatcaagtaataattaaagttataagctcttggtttgaattcttgctccactagttatgtgaccttgagcaaattacttaacttctctgtgccttacttttgccatttgtgaagtggaaactaaatagcctttatgtcccagtaacaatgcaaagtttattcattgccgattagaaggggcacactgttcaagatgctcattaattcattcactcattttatgtaatgactcatttatcaatcctttgttgagtctcaaccactgtcctaggtaatgctgatacaatcttatgttttgaagctcgccacaaaatttgatcaccactagagccaagatttaacacattatttcatttaatagctattttgagtcttcagggtacaatttacagttttgggggggaagatgtagggaaatatgactcgtcagactcaattaagtgcatttactcagggctacccatctattaagtggcatggttctctaaccccatagttcattctctttttctgtgcaccactagtaggttttgcataaggtaattttgtccaagtggttactgtgtgggtcctgttcacaatcttgatcatgattgtattccaacttctatgtcagagtttgcaagcatgtggcttataaactcaagatggctggtacaatgttgttcaatatttaatggaggggtattaccaagatctagttttctaggttttcttgagaaattagaaaatctggcaacactaagtttgtaataataccagggacaactagccaaactgccctattttgttgaatcatgtgctgtctaagtcctcacagtccttgccacccccaaccctgcaatcatcctacatgtagtgtttctatttatcattgtatttttgcttttatatctcttacatcttgtcacattgtatagcctgtctagcatttgaatttttgactcctgttttaagctagagatatgcttgtcactgaacacgacttgaataaggaaatgagtaataattatgactctacatgccctttatagtacacaaagaactttttaaacaaccatgttatactgctactttgattttacagtagtttgctccaaatgagtcaaatggtatgtagtagagtcataattagaatccagaacaattggtgtaagtctagtgcttttctcatttatctgtcattcattcatttattgacatatttattcaacaagtaaacaattataagtaaatgtcaaatatattctagaccgtatagtggatgctagagatatagatgtgactaagatacagtcccaggctttaagaagctcatagtctatttaggaatgacagataaacggatttttctgagtgcattgtgatgtgaactgagaaatacacagggtatgtacaaggtgccatgttaacatcaaatggcatgtgattgattttatctgtgactcagacatacctctgccactgtagggagtagtataattgacatgggatcctggccagtctccttatggtgatggtggttaatctacatgtccctgagtatcatggtctttacagaagcaggagagtgaaatgtaaaaagtgctggaatggaaatcagggcaccaagtatatatggtcctggctctgacatttgcttgctccttgacgttagaaaaatcgttgaatttatgtgtgcctaaatatcttcaccaaaaaataaggaggcataagaggggagataccagatcttacaaaataagtaggttttatttacaaatacttatggattagtgggggccctttcactaggctacaaagaatttgaggctctatctatgcttagttttaaagaatgctatggtcaaagaagctatgtttgtcataggcactagaggaagggatagaaagattctgagatctaggggcaaaagggattttgagagtgcaagtgaattaaaaagctaggatcagctggctcagtggctcacgcctgtaatcccagcactttgggaggctgaggtgggtggatcatttgagttcaggagtttgagaccagcctggccaacatgatgaaaccccatctactaaaaaaaaaatacaaaaaagtagccaggggtggtgacctgtaatcccaatcccagctactagggaggctaaggcaatagaatcgcttgaacccaggtggcggaggttgtaatgagccgagatcacaccactgcactccagcctgggtgacagagcaagactctgtctcaaaaaaaaaaaaaaaaaaaaaaaaaggctgagatcaagtttctgctgcaaggacattttcattagttaaaataagaaggggctaataccaataaaatgcatagcaagttgactattcaaaccaaaaggcctccagttgaagttgtgttttaatttaagcactagtagggcccagcaaatcaaatattgaaagatgctaaaattagtctgattactttgtgagtcatcaaattgatttgactgtccttgcccttcatataatgtcccaatagacacttaacctgactctacttccttgaatttggcaaagtaagcacgatcattggagttactgcttttgggattatttatttatcacatcacctctgccatcattacttcccactcgtctttgtttggcttactttctactgtgcttctctctatcaaatctttgcacctccttaggaagatctggaagtcacctctctgtaaatctgagaagttattttcattgttgttggatgataatgcttaagccagtgttggaggctgcacaagtaaattacatggttttagaagcacctcctccttccatctgtgctgtttggttgtattctttattggatctgggatgatatgacttctttgcctggggctgttgctgccattacgcagttttggattcactgttgcttcataccaatgttggtgctgtaaatgtacatgataagagttccacagtgagatggactacaagacttctggacccagagccccctaaaactagatccaagaccagattatgcactgctactgaggttggcctgctatggtacagactgctcctccttccccaaggatacaggcacttttacatagagggtacaacagatcttgacctgcaggtgttcaaaaatcgactcataacttccctcctcttatatctatcttatcagtaaacaaatattaataagtcataggaatgaaacatgcgactctttttggttttgttggagtgatcatgccagaactgggactttctaatcttgaattcaaatcatgagagttaagcctgtcatgaactgtgagtgcaagctgacccaggaaccatgtggttctcaaaaaaaaaaaaaaaaaaaaaagcttatggctctttttgtgccacaatggcagaattgagtcattgctacaggcagtgcatggcctgcaaaacctgtgatattattctctgctctgatattaacatagctggaatgtgccccaaatgtatttcaatcaagagctttcatgtattttttgaaataacctggataagaaaatccagattttagactcaccattctgcgggggagtgggggcggcagggggtcattgatcctgtttgttttctctcttgcatgctgtccttggagatcagaggattgatgtttgagtaagaaatgcagaataggaccatatgttaggcagggttatagacagtaaagcaggtcagcatcctataacttgatgactcaatcatcctaacattatgccatctgggcgctgatactgttcagctctcccttttcttatgaaaagtttgactcaggtcaaatagggtgtctttttttgtttccttagaattttgttttctcttccttttagggattagttcttttagtcccacctttgagataaattttataatttcaaattttgaattctgatctaaaccctcaactgttctttctcccacagtaaagaagttaaagcaatcgtagcaaaaaatgtagagagtatttctttccccatccccaactttactgagatataattgacgaataatatcatatgtattcagggagtacaacataatgtttgatgtatatatacattgtaaaatgattaccacaatcaagctaattaacatatccatcacctcacatagctaccgtgtgtgtgtgtttgtgtgtgttaagaatatttcaggttcactcttagcacattttaagtatacaatacattatcattaactgtagtctccatactctatattaggtctccagaatgtattcatcttataacctaagtttgtactatttgacccacacctccccatttcccctatttcctgacccctggtaaccacacttctactctctgtttctatacattcaacttttttagattcaatatataagtgagatcatgcagtatttgtatttctgtttctagattattttactctgcataatgtcctctaggtttatccatgtttttgcaaatatcagaatacccttctttgtcacaggatgaataatatttctatatatatgtgtgtttatacatgcatacatatctctctcacacattttctttgtccattcatctgcacggacactcaggttgatataatgtcttggcttttgtgaataatgctgcaatgaatgtaagagtgcagatatctattcaaggtactgatttcacattttttggatacataattggtcctccatatccatggattttacatttatgaattcaaccaactgtggatcaaaaatatttgaaaaaaatgtgtctgtactaaacatgtacagtttttttcttgtcattattccctaaacgatacagtgtaacaactatttacttagcatttacattgtattaggaacttaagtatcttaaagatgatttaaagtatatggaaagatatgcttaggttttatgcaaatctgatgtcatttcatgggagggtcttgaacatctgaagatttttgtgtctgtgggaggtcctgaaaccaacccctgtggatactgaaggataactgttactcaaaagagggattgctggatcatataaagttattttcttaatgcattcatgtatgcactagtgtgtgtatgcctctatacacccatgcctgtcactctatgacctgttgtcatatctgtacattcatgtaacaatcgccatgtttaagaaatgtagcattgagcctatgtcttaactgatgtatcctgtttcaatctatcttgaagtggccaatcaccctatccccaaagatactgctactcaaagcatggtccctgaaccatctaggaacttattacaaatgcagaaccagagaactcatgcctgatatactgaattggaatctgcatttaacagatttcttggtgactcatatacatgttaaaggttgtgaacactgttctaagaaatgtcttcacttcttattcctttggcttgcagtgattaattgggtagaggaggcagcatatcagaatcattatgaagcttaaaataaagtgtgcctgggttttagacccaagattaaatctgaagcgaaaccaaatgtctgtattttttaatgattccaaaggcaatcctgatgtacccaacacagggcaagggtatatattgcaaggagtcacagaatctttttattcttttcttttaaacctcctggcaaccttctcttttgctgcctggtcaacaaagattatctaatgtggttgatcagcttttcactgtcccgttcattcttatgacaatttgccctaactatgcacaaactgagaactctttttaagggtaaataaatgttctcattcatcctcacaattgatttaaaatattgtaacattttctaaatatgtacaaacagaaagctatctcatagttcttgtatgaccagaaagttattgaaattttacaaatcaaatgcaaacaataccatgtaaatgaagaacattaacgtggcagatgacattttcctgagaataaagctctacttgcaacataaatacaacacaattgctatattttaggttctttagaatttggcacattttactgctgtatgccttgtgatttctcagttctgttattatttgtctctgtttgaacccatgcaaaaccttcatccacacagcttagactgtcattcagccctctctttctgcaaataaatctaatatatgtctatagtcagcccacttttcttctatgcagatttcattaatgaaagtagtaattcttgtcagtgtgattgcaagcacaaactcaaagataacattacatggcagtccttggttggcaattgaatggtcagtattcagttgaaaggtcatcaaccagaaatatggttagccattttttagaagaaaacaaattagaaaaaagtatggataacaactttggacaccaaagaatatttctataatatttcctgctcagtctgtagtggaaggcagtagagaatagaacttacaaacatagccttggagtgagaaagatctggaaactatttatgatagttctacttactagatgcatctcttggaacaagattcttcgcttctctgtaacttggtttcctcgtgtgtatgatggagatgattattatctatttcataggccaggaataggtatgatatgcaagaagcacctgtggccctatcttagcacatcataaggactaagttatcaggagctattttaactattataatgatgttatcattgttgcatctttattataaatgtgaacattaagtttttattaattaaacctgccacatatttcttccatttgcttcattgtactcttaagatgtttattcatttttctcacttcttgctttaagaacctggttattacagaggtgaaaaatcccatcaaaatgctagagaatttggcacaattattgcttatatttctcctattgctgcttttactgctgtagctgcctcctgaactgctgctgctgctaccatggcttctagatgcttctttgacaatttatttattttccagtggaacccatctgtgaagaagcccttcatagcagtaatatcctggggctgggcactactacaataatgatgctttcgttaatcaccccatgtaattttagtttttgctgataaatactacaataaatcgattgaaactgatgaaaatagctcaaaatttagagacatacagtatttcattttaccatcagcgtatttctatgtttatgcaatagggattgaaaaagttcaatccccatgctcaaaaacacatacttccagctctctgagatgatatgccagacagggcttttgattagaagccttatttttttgcctagttctagcttctgtatgagtggagactttattaacaaaggtaggtttggagcactcaacagaagcgtagagaatatatggaaaaaaaaaaagaagaagaaaaaagataaaagggaaccaaacaaaacaggtttacaactgttttactaataagagggaaaagtctgctcatgagttaaaccaagactaaagataaagaaagaaagaacatccaaaaccttcatgtgctttgtatttgtacatttctgacatatgcatgaagcatgagggaaatacagtaatacactgaggtatgctgccaacatcctgactattcctagtcattagatagcctagtgatgtttttcagttagaggggtgctgaccttactgttttcagtaattataagtctataattaccttttatattctttaagtgtatttttgtaatttcaggttaggtatacaagagtggaaaccgtgtttgatctgacgttttggctcttgtatgaggcagctttaaatagctgtcagatttggtttcattttagtgaagggttaagtaattttaaggcgttaaaaccatgggcaataaataaccatccacagtcatcgaaggaagttgcttcttagacaagagaatgaagctagagctgctagggacattagtctgataaaaagtcacatcagagaaggtttacctccaaatgattttggtggcaaagaagcctgtgcatcaacacctgcccttgagcacagcagtcaataaaaataaggtaacacaaagcagctctcttgaaaacaaaatcagagcctatactcttaagaagttcatagccgtcacaaaaggaccctcgtggcagtagaagctaaatggccaagaatgctggaaatggggctgcaagtcataaatggagaaagtctaaactaagagggtaaacagcaggtgacagtaaattggagcacttggccaggcaagccctgcatctgccacagtgagatcagttactggagagtcatcccaggcctatttcacactgccgtctgggaatgtgggactctaggttcttaagtgttaactatgggcaaaaaagaaacaagaagtataaagtcattgagaagattgtctgcagtagggcaggcatggatgaaaatcgaactctactttgtctgtgggtgaattatttaccttctatctgtcctgggtctgtaaaacagttataagaatagacagggttaatttgtgaaacttagatgaatatgaagtatgagtaaagtaccagacatttagaaatgctcatcaacatcttgaaagaagttctttcattgagataaaaagggtctttgtatctctttctgtaattcttctgaaaacagatggtcagggtagagagctggtgcaatagctcaaatggtaaatgacagacataagattcaaaagaagctcaataggaagaatgatcctaagacaaaatggatgaattgcaatagggttacataaaccatttccttaggtttagaaaagtcgttattccatttctaggtaggagagattccactgaaataatgtttctgtgctaaaaatgcaaaagccaatttataacttttaaaattataaattgaataagtgcaaagagtgtgatatggctgctagatattggtagaaaaccatccttctcatttgtgcccttattagatgtcatcaagagtcttgtgtgcctcctgctgccacatttaaagaggggagagagagagagaaagggaggggagagaaggatgaaagagagagagaaagacagaaagtgaggcatgtccagtatggtgaaatcagctgtaatcaattccagctcaaccactatgagtccttggacaagttacctcattgacaaaatgaggatggaagctccctccctggcttgacctaaggattggattacataatgcaagtaaacaactctgcacagtacctggctcataactgggagctctgattattcacaggaaagagtggtgagagacagctatgagataaggagctgcagaagctctcggtgatctgccaatataagagaagcttaaggcaggacatgacaactgtcatcaattatttagatacctgttatgtagagaagcaattctcattaatcagcctaactctaaaggaaagaaccaggaccagtagatagaagttatgggaagagatattttggctccataacagaagtaatgaaagcagtagtggtgtagtagtaggaactgagaatgcaaatagctcttggagtgttccagttcctgttctaaggactctgcattcttatttgatcctcagaacatctatgtgaggtaggtataattattattattttcattttacagatgaagaaactgaggtacacagtgaagtaaatttccaagaacatgtaaaatagaaatgaatgacagagctggaatttgagcccaggcattctgtctcttaacccatttatgctggaggttgtgattttttaaactgatgtatgacagaaaaatcagaccttggcaaatatcttgagcagtaggctataaataactcccacatgcttagtgttccaataatggaacactaggcataagtggctacacacattatctcaactgccccaaaaagtagctcaaatacacagggaaaggctgagtgactgtacaccatggttgctagtaaggggattcctgcactgagttaggaattggcctggataatctctacggtccctcccatgacatgtctgtcattttataaaaccaaaaagcaagcaaaaaacacatggtggcaaaagctaatacaaaacctagagtcaaacattcatgaggttttctcaatgcaaaagaagcctaaaatattcacctgtaatctatttatatcaaccttatactcagttataaaaggatggccatcttattgtcttgttcaaggcagagcagaagaaatacatttgaatctgggagtggtagtagaactaatagcagcaaggagagactcatgaatctttaggagaaaaaggaggtgttaacgcactgaacaaatattaactgagtgcctcttctgggctgagataagaaaatcattgtgaaaccaaataagaacaagcattgcaggccccagatatttagagactccagtgacgtttgggcttttcctgaactttagtgtgcaatgtcattttaaaaagtattttaggggaaatgataaattatagccagtttcataaaagaggtatacattatatttttaaaagactttatatgaactgaatcatttgactttaagtttgggtgtaaaaagggtatacttcaatttctctcaggccagcttgctccccagtaaatgacaaatatgggtctcgccgcactaagatattttaatatacttcagtgggaaaggctctgatccagaaatttgcagttgtgctattgataaaatttatgagaaactttcttctgtgggcctcagttttcacatctattaaatgtgctgatttaactaaactatctttatttcctttaggctcagacatttcctatttcttttatttctataactgtacttattttcattatgtagataccagatggcaaaatgtcctggtagtgtgtgcaggactcaaactgattctgggaaaatggggcacaagtgaattctaaggtataaggagctgaagtgagcagaagcctctagaatctatttctatttctgtcagctacagaatgtaggcccagtttaatattaggagacgttgtctagcttttaatattaggtttcagagttgcctaacaaaacccatagaggttgtttcttgcttagagtaatttaatgttataaggatcaggcaggtgcaacatggcataaaagtattacttgccccaatgccacctttaatttctctcaatctttcaaagcatcaaaagaaaaaaaagttctctctttgtctattgtttataaatataatttattctctgtgcttaggtgattttcatagataagaggacattcattgtattcagtaaaacttctagagcagtccttacactagtaacaagtttcctgggcaatactgctttgttatcagacttcaccatgtagatctcacatccttctcttttctgatcttgctcttatcatttcaaagttacatgtagagtgaggatgcaggtttcatagggtttttgtttttatctgagacagagtcttgctttgtcacccaggctggaatgcagtagtgtgagcatggctcactgtagcctcgacattctgggctcaagtgatctcctgcctcagcctcccaagtagctgggaccacagatacatgccaccacccccagcaattttttttttgtcttttttgtagagatggaggtctcaccatgttgcctaggctgggcttgaactcctgggctcaagcattcctccctcctcagcctcccaaagtgtaggattacaggcatgagccaccaggcccagcccatggtgttttctgacaaagctactccattcatttgctgtttgaagttgattagtgaaccacattttgatgttcactaccttcatttgcttttatattcaactgcattctttaagaatcttccctcagcagttagaaggccaaagataatttaaatgggattgagggatatttccctctcacattagtgctgtagagccacataagaaggtattctatggtagaaatagatttagaaaggtcaaatttgaaaaataaagtaagtccagacccgagtgataagatggatggctgtctagattgagcatgcaattctaatacttcagttccacattcttttttttttttttttttttgagacggaatcttgctctgtcacccaggctggaatgcagtggcacaatctcggctcactgcaacctccgcctcccaggttcaagcaattctcctgcctcagcctcccgagtagctgggactacaggcgccctccaccatgcccggctaatttttgtatttttagtagagacggggtttcaccatattggccaggctggtctcgaactcctgatcttgtgatccacccgccttggcctctcaaagtgctgggattacaggcatgggtcaccgcgcccggcctagtcacacattcttaaagatgtttcagcttttgatttttaaacagaatggtatggagaagggcttttgctggaggtgcttcagtcagttagcttcaactctgaatgaacaccgaagatgtcttggctttcctaaagactcaggctacagattcttgctcatggccaggggtaaaatgcccttcatccaatttaatgctctcccatgtgtagcaaacatatcaactactctgggttggcatatgggggttttagtaaaactgtgtaaagaatttgccatagaaataggaatagtctttcactttccattttgtactctgggtcttctctgattatatatctcttttggttttcctttccaagctccatctttatcccaacctattgggtatacatctgatcactgctttgctaacacgataatacttgagactaattaacaataccttagtgatactgcattctcaaataggaaaatttcaaatgactagaagaagactagttgatgcctaggaccagtactagaatggttaagttactggttggaaacttcagtgtgcttgtttctgcaggaggagaactgctttaatgtgaattgcattagaaagctcccctccacttttccttccccagtgtttgtctactgaatagcagggtgaaagcgtcggttgctctcatcgcctcacaatcaggccaattgggcataactgctttctggtagaattcatctcataataaattgcattcatggaagatgcctagtatgtggtaaacatggcatggacaggccaatactagagaaagatagaacactggctcagaggagacacaaacaaattgcctttctgctggctctgaaatattctttttcagtgtagttaaatataaagttgaaatgatgctaactacaccttgatccaaacaacctcttcattgcttggcttctgatgggaatgctgtaggtagccatttgttttaatgattgatttcactaatactgagtcacaattgcactcctcttgaagttgacataagatctccatgcacagaaaatgaattcattagaatcaaagtgattgtataagaaactcaaattatccaggtgttgaaatgcatgtctactttcttttcagacaatggaatcatttataaaacatatagttatttaaaacacagacacacatacagagactatcatatgggattgtgagagattgctaattaacacatacaaattaagacaaatattcattaaaacaaatattaattcctcaaagtttaattcttaacaaatattaattctacaaagagctaaaaggctctatgtaggtagataacggcattcagatttacctcctaatctttacagtaattggttttaagggttggagaaagaagtaaaggaggtaaaagaatgtacatagacaataataattatgaataacatttactaagcatctactatgtgttaggtactttgctaaccaagcttagcatttcacatatattatttaaaattcacattaactacctgaattacattcaattattttactcttcagggagatttgtataagttgtgtaaggtctaaaactgttaacaggaaagctgggagttgaactcaagtttctctagttcctgagccaagatcttagttgctaagttattaccacattctcagagcctctgaagcaataccactgaattcagggcttatgtttattctagcagcatctttctttacaaaggggtatgtaaaaatagtagtccttctaatttctcctccctccccccaatatttctgggattatgcaggcgatactttgcttttggaaagaatgaaatataggcaattgacagaggcagggtcctgactttcttttttaattttttttccttgatgatgagcataatcatgtgaataattaagcttcaagagctaaatgactgattggcagcaagctgactaactgttctttatttataaggatatagctttcatgggaaaatgtagggtggttggtaaaacatcagaagtctcccttgagatttcataaatgccatagcttaggggttaaactcacagacatttaagtcacatgttcttgagttcaagtccaagttgctggccctttgggacttttaactcccctatgatcgattgctataaattaaaactcagttaatagaatataatgtaagtagttatatatcggaaccaatgatagtacctacttcttagggttgtcaagagcatccagagagctaagttatacaaaggactagctcgatcactggcatgggataaatatttgataaatgtggtttgtaatattttataaaagtgacaaaaattcttatttatgtaccttttttactatgaggagaatcaggttggattcttagaaaaccttcagtgcctctgtcacagccttgcaaagactacttgggatatgtttatgttgataatttctccccttttatttttctatcagtcagatttataataagaatcagctgttctttctaaaagactattgtgcctttatattattttctttaattttcaataatcctatgaattagcaattattatcctcatttttacaaatgaggaaactagagatccgaaaagtaaacagcctcccagctaataaacagatgagctgcaataccaaccgaggtcttctgtctctcacaatccagttctaatattaaaacaaaaggctttgagaccatatgacccaaggtgcaatctgtttttcagatcagaagattgggactctaagatagaaacacggtctgtccagagtcacatagcaagttggagacagaatggacactagaccctaggcctctatttctggtctagagctctttcatcatttccaggctacttgtttgtttgcagcaatttgtatgttctgtagaggaagattgaaaagagaaatggatagaaagagagagcagagatgaggggatgagagtctggagagaaggggagagagagagagagagagagaaatagattcatatatgaaggttagatcaagggccagcatccaagggtggtctaggtagagtactgggaaccaatctcaacctggcaggagaggcataattaaccagtgtctacatctgtgatattatttgtccttgctccaaaatgacaatagtgattacagtagatgcagctgacagtagcagatgacacaacctcctttcacctcctggccagctgcagcgctaccatcaccagctatagcagctttctccctggagattcagctttttctccactgatggaaggctttccctccatcactccaatgtcagagcttggccgatttggttcctcaggagactgtagagaaattcactcccattgaagcattttcttgacattttgacattcaatcagagaaaggcaaaaggcaggctaagggcccaatcatcaggtccatgaagatcaagctatgttttctgagtacctattgatagaatgtgcaggagattattactgtttgccaaagctctattgatcttggctttgtgaagctcaaagtctgtttacagccacctataaaaaccaacagccacttcttttactgaaggttaacgtgctgtgtttatttaattgaatggaaatggccttgtgttttccaaatgtcattgttaataaattttcaagggaatctgtgactagtgtgtaggtgttgaggatgggagaagggactgtcatggggagggacggctgttggaatttgaagttgctggaagcaagagataaaagacaaacacatagatacgacattggaataatttccctgtatagaagtgctataaaatatccttactctatattagtgttgttttttaaacttgtcagtaagaattctcccctgggtgttttattctttagcctgcgtctgtttttgtttgttcttttgggtttccaaaaaatatatattttaaagtgacattgagcattttagtataattgtgagttttggggttgaatatttttcactattatttgatcagttttttccttctgtaagagatttaacagaaatggctaaaattaggagccatattagatagaggaagatattggcaatcctattgacctgctttttaagaggcgtgtttcaactaacaggaggagagatgcaaagagctttcaccaaagcaatcagaagacctgtaaacagcctcagggaactgtaaaagtctgtgagggtctctagtgtaccagatgaaaagcagaaactttaggtagccgtctgaatgtgtcaaatgggaatatcagaataactcactaaatttcctttttcaactttcctcgcaaggtttgtctttttatgtggtaaatgttggtgagttccatttttaagttttactcttcccattctacttcagtctccttagcaaacacacacacaaacacacacacacacaaacacacacaacacacacaaaattgttcttcttgaaagatacatgtaaatgaatggtgagtaaaaaattaaagtctggacgcagtggctcacgcctgtaatcccagcactttgggaggccaaggtgggtgactcacttcaggtcgggtcactcacttgagaccaggagttcgagaccagcctggccaacatggtgaaaccccatctctactaaaaatacaaaaattggtcgggagtggtggcatgtgcctgtaatcccggctactcaggaggctgaggcaggagaattgcttgaaccctggagttggaggttgaagagagctgagatcgcaccactgcactccagcctggcgacagagcgagactccatctcaaaaaaaaaaaaaaaaattaaaaacttattgtctcaaagcagccattcatttattcaaggaattgctaaacttttctaagggaccaggcactggcctgagtgctacatcgagagagagtaataagatcgaggatcccattcccacgttctgcacgtgtgtgtgtgcgtgtgtgtgtgtgtttcgatctgtgtgtgttggtgggtgaatggctatgcaaatacataacaatttaataagtcttatgatactgggagtacctgactctgattagggggcactgctttaatatctggcaatggaggatatatccatcttcattcgctccttcatgcccccatctaaccttgattaaagtctgatttcaaatagcccatttgttgaacattttatcaaggtttttcaggagcctgacagaaaatgtaaagtcgtcgtatgttttgttttgggaaatactacttctaaaacttatttgagtgtctcagctttttctttcttttattttattttttaattaaaaaaataatattatcttttatttgtctttaagagacagaaccatgtctgcctagtaccttcacttggtcaaatacctcttttggtggaaacaacacaaattatgtaggttgtatatacaggatgaactcggtttaaagataagacatgaaattcagtggaaatattctttaaattctaaacagagaaatcaaaacaaaggtatattcatactgcatgtgggtataagttttttcttacatatattatatatacatatataagtgtaacacttttaagaattttattgaccatctaaatatatagcaaaatcagctgggggtacaagagtgtaactacttccttttttcctaagttgtggaaaatgtgagaaatgagaagtaagcaagacggaggattagaatcacaaggtaggtttccctagtatgaattcagtacctgaaaatcttcttagttctgagtttgaagcagattctataaaatcctgtattaaaataaatacagtaggaattagcaaggatgggggaataggagtgggcagatatgttcttgaagagaataaatgcagaacattattctttgtcaattaatttttactttttatagattgttagactatttaacaaattcttatgagaaaagtgtgtttttaagtgatctctgggaagatgttcctgataataaattaaattaggactgtgcattgcggagcccccaccagttgtactccctctggtgaatttaataccagacgcaacctagttagaggtgacatgaaatcacagaatttgataatcttttttttcaaagttaagcaaatatagatgagctcttcttgtatatgtaagatgccagatggtgtttttgagaaatcgattcgtgtatagtaccagtccagacaaatgggtccaatccttctatagataaggcgacccacttttcctattcaaccatagggctccgttgtctggcacacattatttaacaaagtgacattgtggagtcatcagtaagaatgtggcttctggagtgaatttctttttgagtttgaatcctttgctgggtgatcctggccaaatttcttaacctgtttgaacattagtttcctcgtctctaaaatgtgagtaacaagagtttctcgtaggaactatgtaaaggtaaaaagaaactgtctagcatagtgcctggcacataatataatttcataaagtgtaactcttgttattaaactggatagctcaatagatattgctccagaaacactagtgcatgaggctgccattacgatcgccaaatgatagcagctgtgaactgccactccaagccctttgcagatgcatgtacttcttcgcaagggcttctagtcattgacttacccagatctatcgtcacctcttgaagaaacaaccagaaaacactttccctacttacagtgaaataagtgagtatccttctacagaaggacagttagttcttgaaccaagggacttcaatgccatatgagaaaaattgtcttgtatacaatatctttggagagtgaaagagttttaagcatcttgatattagaaattaaggctacaatgcattcaggttgcctataagttattcatttctgtatcttgttgtcaggaaaaaaaaaaagaatacttcaaaattaagttttttccatctaggatctcagatctcattgtataattttcatcattcaactggatttaataggtctatcagtatgtacagtaaattattttcaaaattcttcacctaatagctaaaaagtaagccctaatctggttttctgtgaaattgtcctcgacagaataaatagttcaggtgtctgaaaagaaaaattccatattcctatatctgggttgacacttaagactgcgtttgtgaagcctccttatatcttgaagacaggatgtatctatcttgctggtgagaattttgctgttctggagtctatatcaggtacctcaaacgtgatgagtgatagaggtcatgttttgttgtatcacagtttgttgaatctccctccttagagattcatttgactgaaaaattaacaggtttatttgtgcaaatggtagttgcacacccaattattgcttctgggtttcccatgtgactagccaagactcaaggtgaaagtttggcctgcagctttggcaaacaaaggagaagctaatgaatcataaaggtcacatcttcttgaattttcttctctttcttcactgttctgattacttttaaaaaatctctattccttatatattctgagtacaaaaactcattagcaagatttggttctgttgtctggagaattttctgctcactgcaataggaaggtgatccaggtaccacataactgtctccatgaagatgtttgcaatatgttatgagttttttaaagttattgtttgagaaaaggccatataaggagataatttttgcttattactaattagcttacccctcttctgctgttcttacatttatgactatttacttgtaaataaaagttattgatctttttagaagtccattggattctgctgcttttatttttgagaatcattttaacttacaaacacatattaccttttccaaaaagtgaccacatagctttgtgactcctccctcatatattttgagcacacagaaattaccatcctctcactgagtactatacatcggggcctctggctcttacctcctttctcagatccaggactgaatgcatagctgaaaagatgactttagtctttattcacaacctgtaaactaaagaaggtcattaaaaaaaattcttcgtatcttgcaaacaaaagaactgagatacctatctaagaatggcaagtctgagaagcaaatacctggctctagccctctgccataagtttgcaagcttgtgtagacctttgtctgagaattggttaggtatagaaatacacttcagcagagacttgacctatatgactttcaaatttgttatgattctacaattagtgtttgctaaaatcaaaactgtagaatatagtatagagagtatattaattgttggctctatgctgacccaaaatgaagtcttttaagagattagagtactacactgtctacatttaaccaggtgtcatataacaattaatgaaaattcaatgttttatacttagaatttttaagtaataacagatgatggatcaagattaaaactgtattgacagcctaagcaaagaaataaaatctaacaaaagaagctttaaaagaaatgaatgtaaaatcctatattttgattaaataaatcaagtttgcaagtaccaggtataggagttttggactgacagaactttacactaaacaagatgtaaaagttttagttgtacataaatttaaaatgaacctgccttactgtttcttttaaaaaaattaagaaaaaaaaactctacgcagtattaagttctattaatagacttctaatttattactaaattatgttgactcttcatctgaaatgtatctatctttttactccattaatttctcttcagtgatctagtcacagaccttattatcctttacatgacagtagcttaataatggtatccttgcttttctccctactacagtctgtcctctgcatgtagccaatgttatacttgatgacttaaatctgatcatatcattcccaagtaaataagccaacaatggtcctcaataattaccgaattaattattccctgagaaatggggcccctcagtgtaatatctcatctcaatcattttttttagttttgcagatagcacctgccatttctaaatatgtgtctttaattcatcttaaccacttcggattatgacatcctaaaattgccatatatttttatatttccatacttttgctcaggatcttctttggttaaaataatctttcctacttcacctttgaccaaccactgccagtgatccatgagattcaaatgtcttctcatttggaaggactgcctgataacctgctacctcagcttcaggagaaaccagttgctggcctctgtgctgttctcctacctctaaacagaatgtaaagtactattattttctcttcaattgacaaggcgcttctatgattgttcccatcttctgttggtattatttttaataaaaagatctcatatattgtgttaaagtactaaccttgagaagacccccagtctgaaagaagaatatttcacttctcccttccccattttcaatcacacatattattgaataattttggttaacatccttaatattctaaagtatcttgaaacagttattttttctattttcagaaataaggttttagtgataatactgaaaattctaaactgtgagcttttgtttcagggatagaaatttaaaaaatcatgaggtcttctgtcatgattttgaatgtttaatctactttgtccagtgggcttctgaatcttttgtgattggcacgtgttactgagatgcagacacatgcaattctggtgaccgagttctcaagctacagtttattatttcacactgcagtaaatgtatggactgagggtgaggggactgtcagaagatgtgtgtcttgggtgcctgaataatgcttcttttgctattcactttcatcttaatttagagtcatatatttcttgttaccttttggttttccccggcacctaacaatgtaatcttcacaaagcagtgctacattctaaatttatagtgcagtaaatgaaagaggttggatccattgtgcttcataattcagagggaagaatgtctgcagaaagaaacgtgggtattctttggaatgccatatgtgcaataattgaaacattttgaggaatttccaatttacctcttaggaggaattcaggtttttgttctttttgaaaagaagatgattgttacagacttgggaaatcctaaaagaaaaaagaaggactgttgggacatcctggttgttcttgacccccgcaagaacagctacagttctttcagatcacagcacttgaagtcagaagcctaagtgggtgtccagagaattcaatgccgaaaggttttgcccctcttaactctcctgaccactagcattctctctaccttagtgtgtgggtaggtctttgttatgtctccagactcacactagttttttaaaaaaaatacttaggtaaatagcagtgggaccccaattctctttttcttgtattccagatgaaaaagaaaaaaactcaccagtttaaagtgctcgtttcatatgttcacgatatctaatagatgttaaattttggtaccaggaagtgagagagtgatatgaaggaactagtgaaataagattttaatacctggcaacatttcatagatgataacactggtccacttgaacacttgccattttttattcattatatctggtctagatgggtctagctaaaactttattccgtgcaacacagctcttgcctatttagaagcctttaactgtgtgtttaattatcacctggagtggttcttttgcagagaaaacatagaacgtaggatccagtctttcacaatgcaaaagttgaacctctgtcacctggcatgcttgaggaaatttcagaagctttgtcctcaccttagacccactgaataaggtcactaaggaatggcacccaggaatctacattttacaacctctccatttaatacatatgcttgctagaggttaagcaacactgtgggctcacctgtagcacgtagcactaatcagacaagactcaatatctggccagacttttagatgataatcacaagaagcaataacatttttctgaaacaaaacaagtggcaaatgatactgtgaaatctctggcactggttacccaatatccacacataccccacttagctctagattagaaaataaagaatgagattcagcccagaggcagccatgcgcacaggtgcacaatttggaaaaaatgagaccaattcttaaaaaaaaaatcaagctgaagtcaaagaagcttaataaaaatgtaaatcctctttcaactggctccatgttttctgtctcttcatgaacacctgccacctggtgaataatgtcaaggcctctcagagtgggtcaggaaagcaaaaaggcccatggccggaaatgctattaggcattcaaaaatgaacaatccaggtaacaaaaactcatgtcagtggtgcaggtacgatggcgtattctcttcataagaaacactatgcaaatgaatcgcaaagcgtgagagagcagaacttttcactgctgccttctgtcaagttgggaacactgaggtgaagattgagtgcaggggatttggggtggggagggtcccctgtgaaacagtttctgaatgaaagtgagggaagcaggcatgggatagaaggataatttggtctgagatgcaagtgcggctaaagcctcagccagtcccacggtgagctctgaagttaggttgtcccttctgagatgacctaaattgcataaacggatctgagtctttgtacctcccgtgcccatccaaacatccagtcaccatatgaggccacacccattgactgaatccggttctggagagggactgaggtttggtgcaagttgtccgcagccaggacttccaacatctggaggatgagcaccctaatcttgaaggctgaattcagtagcacatccactgcaactgaatatctgattcaaggccaaaaattgtggagctcagagccacaacgggcttctgatcttccacaggctgctgaatgcccctggcagtccactgaagtgataatgttaaggaaggaaatgattagaagtaatttgctgagggatcagagttgcatttggagctatcagcaagtaatgaagcaagaatgtcaatcgacaggtgaatcaaagtcagggcaaaagaaagggaggaggaaatttgctcaaaaaaaaaaaaaagccattactttcattgaggcctgggatgaggtaagtagagaaagtttgcaactgccagagattgctaaataggaaaaaatcttttgtgcacgtgttgctggtgggattgggacatgaaagatgttgtgggacagaatctcactggaaaagtcaagaatcagagctggtttcaaaaaaactcaaccttcaaataaaggatcccctatctctatattgaacctggcaatgaatacctctttcttttccttattggttggcaaggatgtagaacactaagatacacacacacacacacacacacacacacacacacacatacattctttgtttgtttgttttgagacaggatctcgctctgtcacccaggctaagtgcagtggcatgatcatagctcactgcagtcccaatctcctgagctcaggctatcctcctgccacagcctcctgaggagctgggactataggcatggaccatcacacttggctgatttttaattttttgtagagatgaggtctccctgtgttgcccaggctggtctcaaactctcggactgaagggatcctcacacctcggcctcccaaagtgctaggattacaggcacgaaccaccacacttggcaaatatttaattaaatattaaatatatctaattgtttgataaaaagggagagaggctctccttgatggaagtaataggttctggaatgcagtgagttctgctcggaatgccctctgaccactgcctccatgtgtctaatataacctatgacattacccatagaggtgccgctttttcattgggggacactgctccaaaagtgcctggaaccaggttaaaccattgaggttataaggaataaagggcctttataataaagaccatttctgtgactgtgttctgaaactgataaaaagcacttctttctgtctttggtgtcttccttgatagttgtaataagaatagtagtagttattcttctttttcttttttcttgtttgatttgtaaaataaaaacacttttcctttcctctctggtgtttgaatgcacccagtctcatttcagcagtccacaatgacatactgaaagttgtaatagagctacagctttgctgtatagaggtccatggatatgttttctaattataatcattcttgagctgtttgtaactatttcagactgcttacccagctgtatgccactggcttgtttctatttcaggaatcatctcttcctcttctcctccttccccctccattcccaaatccccacattagtagcggccaagttattttcaagtacagtgtatatgtaagtgatcttgatctgctaagaaaagacatactgtttgtttttattgggcaggcagcatcctagggaaaaggagaattacaagtctaatttggttaggaagcatcctttttcgcaacagtgaggactgcaggtaccactaaaatcattgctgttcattactaattggattaagtcctctctgttccaccaaccctgcttttaaaatttcttctctgcttttcattcagaaactgcctcagcctgcactccgttatctacctccaggctttattgcaacacctcccactgcctctctcctggaccaccttgtccacgctgcacacagttgccaaattcaactttctgtgttgcaaaccttgttgtggctccccctgtgtaaaaaccttttagtgtttctcatctccatgaatcactaatccatggtgcttagtagcatgtcaaaggcccttccgaatctatctctagcctacctctgtggaccttatctcttggctctcccacctgcccccacccacacctctaccccttgctttttgcttttcttttccccaaattctgagctgcttatacgttctttcccttcatggtgttttatacctcagcgctttcatgcatatagttcccagtgtctggaatgatcttttggataaatagtgacacttcaagaaatatctttgtcccaacttcagaaacctaattttcattgtgatgaatagctcccacagttttttccccgggctattttgcaagtattgaggattcacatgttaatcctgaaatgtgcgttctaaaaaaaaaaaaaagctccatctgagaacccattaaacctctagtttaaatacccaggcattcttaaaaatcgaatttgcattgtctttgctgcagtgtcttctcaggtaaccaatgcagccatgtcagattgatacatcatgttgttaagacccccatctgtctctagggtagtagaaaagatgcagctacggaagagaacagaactgtgctcctgaacatggcatggctgccgaacctcacagataatcctgaagcaggcaatctctgcagacttctggggtgatttgagcatgtgtagcttttgctggcagctgagagaaatgggaagtcccctgagctgaaagttgggagcactacatcctcatcaacctaaatctgccacatacaatctctgtgatcctggggaagtcactggacctctttgagtcatgctgtcctcaaatgtaaaatgagttttacatttaaatgttctaaataagttcctttagaatgtttcaattaaaaatttatccatctgtatcagataatattggtgatctcattcaatttttttagttccctttttgattatttttgtacccccaggcctcagcgtggcttctcttgcaatagccagcatggcttgttcttaagaaagttgtcctcagtctactactctattgcctctggctggaaaaactcgggtaggtgcaaggtgtccaccagcattttctcctgggatcgggctgctgccagctctggcactttgcctgggactgtagccttgtctggactcccctttccctctgcgtgggagtgcttccttatcaatcatttgccctcgaatccatgtcttaggatctgcttatgggttggactcagcccaagatattctctatctaggtatcctggttgagtttgttaataaaagttcggtttggatttagacgagacaaaccaaacttggttagggtaaatagaggaggaaggtgccttgtttcctaaattgtgtttgataaagtgcttaataagggcggcttccaaagtggttccaggtaaagaagtactaaaaaggcctctttattaatgtatggattttctgtcactgatgtttgtctgcctatgaatagtttagactagatttttcaagtaagcactttataatatctgtaactctttctaggtgttttataaacaactaactgagtagagcagcaacaacaaagagctgtaagttttctgccagtaacttctagtttttacctcctcaaaagctattttaaacaaatatgtgtctaattaaatctcaagggaatgtgaaataaaaactggaatttgagttcagagtacctgaaagagcatttttggaaaagactttgtttatgccatttgtgcatatgtagatggaatcaaaatgtataagataataagagaaaggtgccattgagcctccaagtagaagcccgatgacttcacttatgcccggctgatcacccaagtgtacagttagtcatgatttgatatctgttgtagattaagcctgttgcacacagtttctaccctgatgtttggcatgggccatgcaccatacattgaaacaagattttgaagtaaatagaaccacattttccactttctttcatgcagttattttctctgcaagatgcattctggctccttttgtgaaacctcagatttgattctacaagctgctgagaaacacagcacctgcatgccacccaccaaagagagtgtttacatagtctgttgtacatagaaagcatgtgggtgtgagtatacgtatgtgtgatgaaatggttcaattgacattgtacttacaagataaactgcatgtatcaccaaattatttgacttctctactcagaaagcattaaattttgaggtttaagtagacattaaacatttataatttaatatacatttaataaaattaatatttatgaacacatttgccttgggaattaaaagtggaaaacagtgtcatttacttgctaatggccaccacggtgccatgcagttacagatttgatggcctgcatcccagtgacattgctccaagaccagagacaagaccattttttgtttgcatggagctaagtattattttcagaaaatcaaaaccaaaaggtatgttttgcttcctagctcagggtctctggagacctgacctgccaggtatcatttgctcattttatttaaagaaaataaaataaatattcaatggagaagttaaaagtctctttccaactcaactctatatctcaaagaattattttctcattctgtcaagccatgttaaaattttcaagtaaagtcgtaatcatttctacattttctttcctgtttgtcttgcatctcttaaaatggttttaatgttagaagctacttgacaatggatgtgaaaatagatttaactcagcaatcaatatattatcaataataatcattaatttatacataaacatcacatgggtagctttccaagtccatcctgttttttgtgggctcttatgctggttcagagatgatatatgccatttttataaggtgaagaagtggagcagtataaattgtaccaagcaagtattgagcactgcgaagttcactgttccttagagaaatgagctatgcatttactgctaaaaacaaacctttcataaaatatttttttgggcaccaacctagtgaaggagtaaggaaaagaagtggatggttttagcatttaccctatggaagcttatagcctggatggcaagatcaaattaacatgagaaggcagtttggtgtaatggttaagagcctttggattcagccaaggcagaaagtgatttgaattctaattgagcccctttttagctgtacaactttgtaaaagccctttaccttctatacctcagttttcttatctttaaaatagaaatgctaatatctacctaatagtgttgttactattgtttcttaaagattgacaacaaggcgtatgaacagcatgcctggaaaatactggatgctcctcataagtagttatttatttattaatatcactgacacaagtgaaataatccatctcttcctaccccagcacacttatcataacaaatttgtaatttgtatgtttacaatatcttttctgatgaattgatccccatagtatatttagagcagtggtgtctggatttgtataaatctctgtaactctagaacttcacccagtggccaatacataaaagattctaaataaatatttgttgttgtcattgtaataggggaagagtatgctccaaaacaaagatactgattttaaaaacgaccacactttcaaaaaaaaattttttttaattctagagaccagcatcgagagtaggagtactcagtacgattatttacggtaatatatttattgggtaaattaggcaccatctggtgtgctagcttagatggctctagttctttattaatagatatatgagactctggggtaataggttgctagatccatatgctattcaggagacaaatttagtatacggtaagcttgctacaggatcaagtcgcataagaaaatgaattgaagtcgaagaaatgcttaggttaacccaacaactctgataattgaccaatgtggcaagggccattctgttccaaaaataattaacaatatgatcagtactgaattaatgttgttacggattataggtttcaaattttcccttgttaggaaaatcaccttttaaataatctcatagggttttgaacaaagagcacagtgtttctttttttttaaatagaaacccatacttgagaaggtagcaaagagtagcaaagagacctggatctctgtagcaagttcttggcctggtcttcattttcaattctaaaaattttgagggaaataaacagctgtccaaacaaaatgctgaaagaatatccctggacaaacagaaaatctttttttttttttttttttttttttttttttgagacggagtctcgctctgttgtccaggctggagtgcagtggtgcgatcttggctcactgcaagctccgcctcccgggttcacgccattctcctgcctcagcctcccgagtagctggaactacaggcgcccgccaccgcacccggctaatttgtttgtatttttagtagagacggggtttcaccgtgttagccaggatggtctcgatctcctgacctcgtgatctgcccgccgcggcctcccaaagtgctgggattacaggcgtgagccaccacacccgaccgacaaacagaaaatcttagaggggcatcaaagcaaatcatatggatggagagtgtgaatatgaagaaaagcatattctttcttcacacacacacagtatgtgtgtgtgaagtaatcttcagccaaagcaaagactaaaatgacctgttcaataagatggaagcaaactttaaaaaacaaacaaacgacaaaaaaaaaaactgtcctccttctccgccaaattcaggatacatgttttatcagcccatgtgctattaatctatttgtgattattctatttcattttctctcccatgcttttctcatttcttctcctcattctaggtgagtataggaagcatcagggctggggccataaaaagcctgtggccaaggacattgcaataagacagagaattttagatacttcattaattatttttcctaccagttaaggattccttgtgtaatgacagaacaaggagaagacagcaaaataatactaatgctaataaaaatatgtaatacagagtacttatgatgatataagcattgttttgtttgcttagattattctgtctggtgttcttaacagcctgtatgctgggcaataaaaatagagtctcaggaaaacagaaccaagtttgctataatttggagagacaaaactaagctaagattctttaagtaatgttcatggggagtttgtgcatatgatttatcagaaagagctgcttctaccagggctcataataataatggttcccctgaactggatgctaaatttatcaactggttattttgggcttctcttgccagtaagcctatagaaaacaaaaacaaaaacttttgctataaccttgattattcagagaaaataaggtttctgctacacagcagggacaggacatggttggcaactgggaaagacactcagcaaatattacagataccagaaggaacctggagaaactctgattctttttcattttgttcttaaaaagcaggcgtctgaaatgtgcccaacttcagctaaagaaaaaaacactattgttgggtctagacacaaagcctgatttgctgattttatttttcttcatttagttattttattgttctgtaaatatggacttaccttttttgcttctttattttatcttttggtagaaccttgagcagggacaccctagacgttcaactgttccgtgtgatcagtgtctgccttaaaatgtctgaattcctgtactgcatttcccagtgaagtttagtgtttatggcaatcctcccgatggggagagaaatgagccggcgaggccaaaagcagcatctgtgacttgctaggatcagctggctctgtgtgcatgatttccacttcaaagggtacacagacaacttggtgatagtccatttattgcagcctggtcttgtcaattagtcaaagttatcttctatacagctacagtaagtaatgtaaaatcatttacaatataggtgttagaacagcagagacccttagagttcatgtatttgacttcctccttgcacagttgaggaaattatgaaatgcatgtctttagcttcttcattctacagtatttattgagatttttttatgaagaagaaggataaaaagatacaaacttgtatgaagttagggaactggagaagctaactcattttctcttttttttcctgtgtctttggcacctctattagatctggtccgtagtgggtctaaataagtatttattgaagaagtaatacatgctttataaatgatggccaaatagctgtttgaatggataaaaaagcttcataaagaaagtgatacttgtactacgtcttgcaggatgtgggagaattggaaaatgagagagaatagagaaattaaccaatattatagtccagccaacagcaaagattgaactaaaattctggtctggtctagaggtaaaccaataggctcactttccaaaagaaaatctgaagcatttaagattatttaataaggaagaatttcctctggtgtcctgaatgaggaatctttggggcaagaagggtcctgtcctatttattatccttaagaaattccttgctatttttagttctcaacatcagctacttctcattactaagtaaaagccagattacttaacttgcactcaccctaattcatcttatccactggcagcaaattccttccttagaatacttccccactggtttttgagaagtgaaaaggattaacatatatggcagtggagtgttttatgtaatagtctttttattaaccccattatccagctgttggggtgctgggtagagaaggaagggaggaggaggaaagtagttgttggcactgggggttcagagccgccccagctccttgagatgaagggatgaaaataaatcctctgtattactgaagcatgtgaatgccatgaagtagtgggacctgaatcaatacattgcatttacagcagagcaaaagaaagaatagggttttcagagtttatttatcctgcttctctgaaaaatacccgtgtgaactattgggctgagagtgttgagtccattgaatttgactctttcactgccatatctttggagagaatgccttcccaaagagtcatatccaaatgtaatgtccctcccttctcttatgagtgacttacttttggtattccactgggtggaaaaaagcttttcttacaggatatatgaactaataatagttatacgactgcttcggatttgtcgcgctccccttggataagtttaatatgattttgtacacattaattaattatcttaataacagacaaaatagaaggaagccactaccgtcctttccagtgcatcagatgaatcaaaatgaatcaaagggctgggcatggtggcccacacttgcaatcccattactttgggaggctgacaccagtaaatcacttgaggccaagagttcaaaaccagcctcagcaatatagtgagaacccatcactacaaattcctttttttaaattagctggacatggtgacccatgcctgtagtcccagctacttgggtggctgagtcaggagggttgcttgagcgcaggggttctagactgcagtgagttatgatcaccactgcagtccaacctgggtgacagagtcagaccttgtctctaaaaaaataaatttaaaaataacattaattaattaaaatggatcaaataaacacatacatattgtggagattgtgagaaataagccttgttctatgtgtctcaggtttacctgaactccaagtagccctgatgactatatggcagttatcacaataagcaacagcataaaggactttgagaaatcaacagatcttatttttaaaaatgaattttcttaaacatgtattcactcagctggcagtggtggctcatgcctgtaatcccagcaattttagaggctgaggcgggcagatcacgaggtcaagagatcaagaccatcctggccaacatggtgaaaccccgtctctactaaaaatacaaaaattacccgggtgtggtgacacacacctgtagtcccagctactcgggaggctgaggcaggagaatcacttgaacccgggagtcagaggttgcagtgagccgagatcacgccactgcactccagcctggtgacagagcaagaccccatctcaaaaaaaaaaagaaagaaagaaaaaaagaaaaaaaatgtattcactcaatatgattaagtacctactctgggctagatattaattagatcattgagagtgtaggtgtaagccaggcagccagacatcaattctcatggacttgcattctagaaggagattgaagagatgaggcaacagttgtagagaacaccttactgctcatgggatagaaaattaccactgggatgagggaaagttgctacttttgattgtggtcaagaaaagcttttcaggagatcacccttggcttgaggctcattgataagaagaggccagccatgcaaacatctgggggaagaggaaagagcaagtgcaaagatcccaaagccacagagatgtttatgtgctgggagaacagaagaaatcccagtgcttgtagtgcagtgagcaaaaggaagtatgaggccaggtaaagtaagaaaggttggcaagggtcagatcatggagggcctttggggctgttgtaaagagtttcatttcattctaaggcaattggaatccatttgagaattgtgagcgggagagtggtagggaccaatggccagtatgtgatgacaggtaatgtgatctatgctcctatttttaggggcaggcctccttaaagatccatttattgatttaacaatattaaatgaaagttcactatatgccatgctatagtgttctagggtttcagcagtgactatgacaggtctccagctttattgagcttacatcttattgaggagaggcagacaaaaacgaataagaaccgtgaagaaaatatagagtttatatgataaaaattaatgggatgaagtgctggaaatttcactggattggagaccactagggctacttcagtaattagttttgaggtctcctgttgttgtttctcagccctgatggtcaagaaattctttcctgttttgcttgtttccatttctgtctactgctttttattctgttgtcctcttaggtagtacacagccctttttctgaaagtcttatctctgatgaagaaaacactttttctcttcaaacagtaacttagtcttttgctttatttcctagagactctgatttcctaaagtttttcatatttgttctatgtattcattcttttcattatttttgttgctctccacataaaaatataaaaacttatcctgtaaagaagtattaatttagacatcatttagccagaatatagcagaagaattattttacagttcttataaggtacctactaatcctccctcctccctgccccctccctgtcttctcttttctcctttccttcctttctttttctcctatcccaaaatactagttaaatagtttctctcctttaaagtactttaaagataacttcttcataatgaactcttgtgtgcataagcatttcttttcctgttaagaagcagtggacaatttttttgttttaaagacattctagaagattttaaaaaattattgtggtaagaacacctaactgtgagatctatcttcttaatagatttctaagtgtacaatacagtattagtaactgtagacattatgttgtgcaggagatctccataacttattcatcttgcattactgaaattttatacctgttgattaaaactaaagatccttttcaaaaaatacttcttaagccatggcttcccctggttgtggactgtaacccttgatgttattgaccatcttgggattaagttccattaagaaagacagtgttagacattgtggagaaataatagcaaggaaatgtttgttctggtccaccaaaatattgagggaccaattttaacctccacatcgttccttctggggttttcaggataagaaaaaaggagctgtggcttgctgctatttcagtagtcaaataaatatttttaaattgcttgtttcattagtaggatgtttttctgaaaagacagagtatatacccctcaggatatttctgccaatgtgttaaagtatttgtaaaaaaaaataaaataaatggctttgtagaatgttcttgtttcccaaatggctactgattttcttaagaaaaaggtagcagcaatttgctgaaaaacaaaaatgaccttttattagtcaagagaaataagataactaatttagattgaatgtgtttatcctaccagggtccaaaatttctattttcatgtattctccttttcttataaaggctccctttggaactatctaggaaggacctgccaacatccttgaacagtgaccattcagtctctactatactagaacccatctgatgatgaaattttgactatatttttggagatttcattctgtcattggatagctctaggaagtgcttttacaccttttgagctctggtcttgagtccagtaatttttacgtatcagtccttgttctgccttccaaaaccgcataatcctccttcaacttgacgtcctttatgtgttttgagatggcccccatgggcttccaagtgtttctggctaaatatcctgagctcatacatgtgttcttcatacagcagcactttgaggcctctctccatgctggttaccttcctcccaagtctgagttttaatgtcctgtttaaaatgttatgaacacagctacttagaaagctgtgcagtcatctcagagtagaatcagacaaggacctccttcacacgaagtgcttcctgtgaggacctatgtaatctgctctgtcttctgctatcatttgtttcttcccttctctcctttgcatcatccactccagcgacactggtttccttgctgttcctcacacaagccaagcaccctttaacttccttttaaagccctttacccttatttcctctgccttgaactctcctccttcagaagacatggggcattctccctctctgcactcagattactattgctgtcccctcagaggggcctgcccttcccaacccattctaaacagccctcccccatcatgactaccccttgtcatgcttttattagcccttgaaattcccagacattatgttatcattccatttatttgtttattgtctgctatcattattagagtatgatctctattaagtcaaggactttgctagttcctgaatgtcttttcagtacccagaaaagggtctagcatatagaaggagcataataaatatttgtgaatgtattgactaatttactatccatgcagattatctttaggcagaggatagagaataagactttttagtacatatttaacagtgtgtgtagccatccatacagtaaagaattctgcaactcacagtcaccccaaacagcatttgagcttttagatactatagagcaacctgtgtctgtgtgtgcatagatatgtgtgtacatgtacacacttatgtatatacatacacacatacattcgtatacatgcgtgtacatttatgtatgtattatgtgtatatctctgattaaatgggtgaacatgtggtttggggacccgtgtccaagccctctagattgtagaagctggaaatgacaaaagtgaatgaagtgagggaaagtgagccagcaggactgctcactgcacatgaatttccaaggatacagttgttcttgaacaatcacagtcagtatatcaaaataagcgctttattgagtagggtaaaaggagttgctggaaagactgtaaattctctcgcagaacaaatgataactgagcccaggagcccttttgttcttgggggagggggcataaattccctgaaagtatctgtcgcagggaattgctctgcattcatcatgtccgcctcctgcatcattcatgaatgtcataagactctaaagaattggcacttcatagtgaagatgattaaatagccactatacttgtcttttctgctgcacagtgctttttaaaggaattccatttaggttgtagcatgccccttcgaatcccttcgcatttcttgcaacctgaggtctctgacatcagaggaaggcccttgcttgttgggactggacagagctggtgggctagcacttcagtttgcttattttcctttgatggagacaataggatctggaaaaaaaaatgccataaagctcaaagcaaatcattttttagggagtatagaaattgctgtttagattctgcagtgaatgagctgtaatttttttcagatattttcacttctcttatcacttccttgtggactaagaataatgaatcagaacaagacacttttatatatgatttgctattttatatattcaaatataaggcctcaagtcattttgtagccaataaagcctatgtatgcagtgtaaatactgatgtaacagagtataagatatagaatcggccaggcgcagtggctcacgcctgcaatcccagctctctgggaggccgaggcgggcggatcacctgaggtcaggagtttgagaccagcctggctaacatggtgaaaccccgtctctactaaaaactataaaaattagccgggtgtggtggcaggtgcctgtaattccagctgcttgggaggctgaggcaggagaatcacttgaacctgggaggtggaggttgcagtgagctgagattgcaccactgcactccagcctgggcaacagagggaaactccatctcaaaaaaaaaaaaaaaaaaaaaaaagatatagaatcttacttctgtcctctcccctgcatgcatttcttgtcatgtatacatattctctttctctctctccctctctccacacatactcactccctctctctctctaagtgccctagagtaattcttacttcccaaacagcatccttaagtgacagagtgcaaatgattgaattaacatttatctactcaggtatatgtagaatctaaaacagttgaactcctagaagtacatagtagaatagtggttaccagaggcctcaggttgggggttggaaggagcagatgttggtcaaagggtacaaaatttcagttaggagaaatacatttttgagatctattgcatagcatggtgactacagctaataataatggattgtaaattgcaaaattgccaagaataaatttcaaaagttctcaccacaaaaaataataagtatctgaggtgatggatgtgttaattagcttgatttacatcattccacatagtttacatatatcataacatcacattgtaccccataattatatataattatgatttgtcaattaaaaataaggccaggggcggtggctcacgtctgtaatcccagcactttggtaggccgaggtgggaggatctcttgaggtcaggagtttgagaccagcctggccaacatggcgaaaatataaaagttatctctactaaaattataaaagttagctgagcatgagggcacatgcctgtaatcccagctacttgggaggctgaggcacgagaatcacttgaacttgagagacagaggttgcagtgggccgggctcacgccactgcactccagcctgggcaacagagtgagactctgtctcaaaaaaaaaaaaattaaaattaaattaaaaatataaagttggtcaataaacaaattttcataagcacttatgttagaggcaacagaaagtatttagagagaacagcagactgtaattaggagagaggagctctgatttgtttccaccagtcatcactgtcacctcagacaaattctgtaacttcccagggcctcaggatttgcatctgcaaatgaggacacaaatggtggctccaggattctccttccactcttatgacacatggctttatgtgtcaggaggggctcagccatcaggagggaacagaaaaaaaaaaaaaaaagctcaggatatcaccactatttctgaggaactcataatttaatgatctctgcaatctctaagctctgctgggaaatgagctccagcataacacgggttctgggtctgtagtggcatcgctgactgaaagataggtcatttttaaaatagtggtatgacctttggctgtgatttcctcataataaacataatatgatttttgtgccaattttctgttaattatgggcttctcctaaaagtttatgagtttaggaagaatgttctttttaaagtagaactttggacacatgttaggagatccaattaaatagatggatcatggaaattgggtcatcactggttgttaccagtaagaggatcccttagagataatgtgttcacctgttaccatagaagtcttatgagctgtgcctgtaagttaccagtggcttcaaggcaggtagaccttttgagctttaatttgttcctagaaggaacctcttcacttctcattatccagactttccctagaagtgggagggctgatcaaaatgccagccttggccctttgcattctgctgctccagccatgtgggtctgatttgttcttactgctggtttaagagagattaaaaggagcaaagctgttctctaagtttcttgatctgcaccgtggcagccagagtcagaggaaatggagacaatgggaaagggactaaatcctagagagtgatgtgtctgggatctcgggaagcagacccagcgttcaaatgcaggcttcaaatactaggtcattgctttggagaatcttcttgcacccaaaacaacttgccacaacctatgtggcccaatgtgcagcaaaagctgagcctgagataaggacagacaggatatatggctgaataaagaactttcaatttccttttcttagtagacggacaagtatcccatcattaaaaaaaaatagccacataaaaaagcagtttccaatctaagtgcacatggggtatgccaaaatctttgcacatgattgacttaatcagaaggcccaatctaatggagagaagtactgtattaatttaaatatggcaggtgctttctaagtttattgcaagagttaaagaccaattatcttgtatttttccataaaattgcattttctaaaaagagactggtgtgtctgaatacatccatcataataaatcttcaagcttggatggaagtgactgctgtttatttgcagcatgtcatatctgtactattgaatcaatgctaaagttatcatattagaactaagatgagggcccggaaaatgagtttttatagactcacagcgtgattttgtgaataaaagcataagaccaggaccaggtgtagaaagtgccttattccagggcctgatgacctggaaggcaattttcaaatgtagggattatgcagtcacctctcacaaggtccagggtgaagaacaagtaagaaactttctattttctggggaataggcacactttcaaaggaggaagaggtattgagatgagacagagaaattgagatggaaagtgtatttgaaatatgtgtaattaggcaggagaaatgagaatcacaaaacactagcaaaagtcattgtcttgctaaaaataataaaggaagaaaaacaaagtataagctaaggctttgaaggtgataaaatattaagaaattttgcttctgtatttataggaaatcagtttttaaaagtataaactaattactaatatattacataataatgcagtgatgttgcttgtccatgataaaaggtaataaataaaaatttgtttaatgaataatgaaaaatagctttcacatttggagttgattttgattcattttgatctcttatgtggctcttggctgtagactatctttgttttaagaagagcaaacccatttgtcctaatattcctggagaattatttcattcaaaagaataaaaatatcagccaggcgtggtggctcacacctgtaatcccagaactttgggaggcagaggcaggtggaacacctgaggtcaggagtttgagaccagcctggccaacatgctgaaacagagatggtgccactgcactccagcctggacgacagaacgagactctgtctcaaaaaaataaataaataaaaataaaagtaaaaatgtcatgtatataatatagagagaggttcaaatacgctaagagaaaaagaagccaagatcatgtaagcattatgattacaaccacatgcagactatgtttttcttctggctgaaggccagagagaaaggcaagtagctgtatattcagtgggtgttatttggtcaaatcgatttacatagtcttgcaggtcttccaaatactaaatattaagtacttggaaaatagctgagcaaaatctgagtgcattctatgatgatacagtagcacagtcttgcttgggacttaaaatcatggttgtttatggtcatggagttctaaccaaacccttgaacacaaaattcagtgagctcaaaatgaaactaacactttcacattctaatctgtatttccttttctatctactattttatttgtccaaatttgaaaactctgaaccaaccccagatccttctttttttactccccaaatatcaaatagatcacaaaaggcttttattcttcatgtctttcatatctgcttcccctgatttctcatgctcactgatccaattccaattttcatctctcgtgtctggggtattgcagcagtcttcctctaaatccccatggtcacacattatcctccctccatcttctctactgcagacaaagttatttttctcaaactgtgcattttcccactgatcaatgtagtcattctccaactttttaaatactaaaatcactctttgaaaaattgatatggaactttgtttttttttttaagacagagtctcgctctgtcaccaggctggagtgcagtggcgtgatctcggctcactgcaacctctgcctcccaggttcaagcgattctgttgcctcaaccttccaagaagctgggactacaggtgcatgccaccaagcccagttaatttttgtatttttagtagagacggggtttcaccatgttggccacgatggtctcgatctcctgaccttgtgatccacctgcctaggcctcccaaagtgatgggattacaagcatgcaccaccaggcctggctacttttgtatttttagtagagacagggtttctccatgttggtcaggctggtctcgaactcccaacctcaggtgatctgcccaccttggcctcccaaagtgctgggaatacaggcatgagtcaccgtgcccagcccaatcatatattctttaacattgttgtattatttcccagcagtttgtagcttattttgttttaatgctttattttcctagtaacaaattctaaaacgatgttgaataatattgtgataatgaacatctctattttcctgattttaatggcaaaggctatataattttgccatttagtatgacaatactttgctgttgataatctctatcatatttagaacatcttaattctatcttaattaaattttagagggaatggctgctgaattttttccaatacttaaaaaaaatcctgagtaaaattatattcaaattctactttaattaggtaaagtaatgaattttgttaacagatatctttaagctgaaatacactacttttcatgtttctgaaatcatatttttcttctaatataccattgaaatgctattcaaaaaatgtttatcaatttttgtaagtgaaattaaagtgttttgtttttgtgtagcatatttattaggtattggtattaagattatgttggatttacaaatgaattggaaaatttcttagtctgtttgggccactataacaaaataccataaactgagcagttttgtaaacaacagaattttgtatttcatagttctggcggctgagaagttcaagatctaggtagattgtattggtctctggtgagaatctcttttctcttcataggcaacatcttcttctataacctcacatggtgaaaccttacatggtgatgtctgttttataagatcgtttgtccccaccatctcccaaagaccttaccctataataggaacacattgaaagttaggatttcaacataggaatttgcagggggatcataggcattgcagtccatttcatgaagatttctaaccttgcctgtagtatggtataaaatggagtaatttagaaattatctcttatcttaaaagttatgttgaaaggtagatgaaaattacctgtaaaatcacctagatctgtattttttaattattaaaacttgaatctcctttccaatggtgtctatggtcattagcctattgagtttttctactttttcttataaatctttgacaagttatactttttcctagaaatgatccattccttctgactttcaaatatattgctttaaagttgtacaaagtatgattttatatttgtaatcttttctattgtgatggttatataatttctaatgttctatttttctcctttagtttttatttctgtttttttagaggtttatatattttctttgacattttaaagagcaaactttgggatatttttaacttttatattatttcaaatattatcgggtaaatttcagcttttatttttaatcatcaaaaaccatcttatttatcttatttttgtaatagtgcattaaggtgaaagttcagtttatttatgtttattttccttattattatttgagacattttcttctgagtttctgagtaaagctttatctgaagtttatatgacttgatatataaagctgtctcttcattaatactctaattattaggttttggtcttttttactgtatattttaagattgtatgtataaagagtactgtttgttcaataacttaattatagaaatcattaaggatttctttgtcaacaagaatattatcagtttaacaaatgttccaatttgaaatatatacgaattactgaatatgcttctttggtaaaattcctgagttgcttatcacccaatcatcatggtcattctttgccaatttatttaagcacttactgtgcccctatgtgttccaggcactgtgataggtaccaggaattctttcatatccaaactcttctagttgtgaaagaacccaaatttgaactagcttagactacatgagttagctattaaaagttgtgtataagaaagacctggccaggcacagtggctcatgcttataatcccagcattttgggaggccaagacgggcggatcacttgaacccaggagtttgagaccagcctggacaacatagtgaaaccctgtctctactaaaaatacaaaaattatccgagcatagtggcgggtgcctgtaatcccagctactctggaggctgagacaggagaatctcttgaacctggaggcagaggttgctgtgagccctgatcaccccactacactccagcctgggtgacagagcgagactctgtcaaaagaaaagaaaggagaagagaggagaggagaggagaggagaggaagagaagcagaggagaggagaggataggagaggagagggacaaaggcacaacttcacaatatagattataaaaactaggtattttaaaaatgataagatttttctctctgtggccagatctaaattcaacagcttgtctttactctttcagtcaggattgattttctcatgactttctccccataagcagaaatgtggccacggcagctgtgtgtctcttatgtcacagttttatcatcagagaggcactgatggagtgtttctctggttccaggtttaaaaaaaaaaaaaaaaagttcattgaagttctctagcctagcttgggttaattgattacaccttagtccatctgctgtatataagagcagaatcttttacggacatgacaatttcagttcaaatcacatgataaatatggaggaaaataataatttctttgtgaagaggcttaatgtttcaagatagagacagaggatgtgctgcgccgatagaataatgaaagtctcctatagtcaaaaaacaaacaaataaacttgaggcagattcttcacttcaaggtgctcaccataaaatggcaatactaaactatttctagaactctatatagagtgcctgttagttattttgatcctgttacaactctttcagatgatgaggtagaagtgttgtcgccttcttaatcatggagaaactgaggctcagtgaagataaatgattgttttagaacagaagcatggactttaatagttgggatttgttcttttcatccaattctgacctgggttctatgattaagaggtatgtgtctcatagaatcaaatcatcacccttcaaaaatattagccagcttttccagaaaaatcgtgttgtatgaattaaagccacaaatacaccaaagtcatccgtttacagcccctggcctcttgtaagtatgaggatcatataaatcaggcatttaaatcaaagcactggaaataagcaactgctttttatgtgtattgtttttccagagaatattcaatacttagctaccccttcattgttcttattaaaaaaggtatttcaaggctgtgaaataaaaggaggaaaagaagacaaatgtgtatgttccaaacttctcctttcctctaatcatgtctcatgtcatcagaaggaatgcacttctgaaaaataaaatgctacagaaaaggctgctgagtaattataaaatgattacttttgtttttcctttattcatttatattttgcttatgaacaaatgtatatatggtctttgcttttagttaatgctctgtaaaatagaataacgtggctatccttaaagatgtcacgttgcttttctgttgtacatccctgttaggttaaatctgagatgcacttatctatttatttttacaaaaacaatttgcaatgtgatttagaaatggaggagtaacataaaacaatttgactaaaaatgggtgtgattttcttatctgagactgccaaaaattcaccaaagaaaaatcattcaaatgtctttgtggttaggtttcttttataaattgaaagttgtgttctatttcatcatgagagatgctgtgagctctaactgatgagcatttataaaatatttccacgttgagatgaaatgacaaaaaggcaagatgaattaatgaacattgtatattcttattcctttattcccattctactccatgcctgaatggcaacgtgaagatatgtaagcataggtaagccaggtttcattgattagttcaacagcatttatttcctgtgcattcacagtgttgagagataaataaattaaacagccctggcttccaggagctcgtagtagagaagcattctggatttccattttgtttgacaataaaacttaatatttattttcttaagcctgaatactgtgcaatttcctagaacttattttgttttgctatataagaaactagcatggttatgaaagttaagttggctgtgagttaatttctcacatagacctcattataaatttacccttcagaatttagagttgtctgagtgtggtataattaatcaggaatggactattatctgaccttactttattcactttataagaggacaacctcatgtaaaaccactgtcatttaagtaagataaaatgagtacctctatactgccagttgcattgtgaaaggattgggttttcatcttgtttgctgtttttgttttgtttttaattttggccacatattagaaagccattgtccttctttccatcatcatcaggtaaatggtgagaatattagagatacagtttgacataatgaaaagaatgtagattgttgagttagacctggattaaagtcctaattccattcgatatttggtaaaagatcttggcaagtagttttaccttattctatagcttccctcatctttaaaaccaagatagtaactgttatgagctgaattatgtcccctctacaaattcagatattaaagtcataaccctcagtatctcagaatgtgactgcatttgaagatagggttttctgaatgtggtgtaattcatcgggagtgggctatttctgaccttgctttatttttcagtttcagaggttattttggtgggccctcatccaataagactgatgctcttataagaaaaggaaattagggcatagattggtacaaagggaaaaccatgggaagatacagggagaagatgattgtctacaagccaatagagaagctgtagaaaaagccagcactgctaacactttgatcttgaaattctagcctccagaattgcaagacaatgaatttctgttgttaaagttacccagcctgtggtacattttacacagccctagcaaactaacacagcaaaaaatatttcaagtgaaaaatatagagttttgaaatattatactgtatactaagatatataataaataatatatacacatagctggtattagtattaatattgatattaacattagtctagagttagtattgccaaacagtaccaaagagtttgtgaaagaaataattgtcccaaaggaaaaacaatgagcttatgaaaattcctttaagcaagagggaatttgagtgtgtccgtggaagctttatttttaggtcaattttagcgtctacagcattgcgtattctaccactaatcatctttttccttagcggaagtatcctgaaatttgatgagtaaaaatgactttcttttatatttttgtgatataacagcttctaaagtaatgtgtttctgaaaatgtcattacccctaagacttacttacaaagggtcatgatgtgtttgtcaaaactcatcagtgtgtccagaaactatgtgcgtgtgtattttagtcaaactttctgggagttaaagtatatataaggtaacacagcaatggaacatcgcaatagttggcatcagatttgcaaatggcacaattatttgtttcctcttcactggtccttgaaaaatacataatgttcccatcaaaagttccagccaagcatatttgtaagaacagggtttgaacataacctattatatcatgaagaatggctctcttccatggtatttaccaccagaattaagtagtggtagacttttttttattcatggaaaacatttagtgaatgggtagaatgttatttgttttatatttttctctcatcagctcctttggagactttggcatcgggcagaaaaagggtctcactctgcacaccaatttgagttcccatgttatcaaacagatttaatgctaaactaaactggtgtttgttctgcttataagtctttgagttgaagccttgtttctggaatattgggacatgctctgaaatgttgcctctgtagatcctagaaagtaatgatgttttctgctttcatgcgatttagttttaattattcttccttcaacagagagaaatagattgccccacagggagggaaccctcaccttgcttgagcattgtctaagaaatggctttttctcatgatgtacttaactgttaggcaatgttgtcagtttctcagcttactgagcagcaaatctgctcatttctttgccaaggaaaaagaatgttcttaaaaatagatgaactttctctcttaatgttcagtgcattcaatgttgctttatttaaggctgctttatcatcagttctggtgtttatttcaaaaaattcaaagtagataaaacagatcattcactaaattccatctattcaataaataatttgcagagctgtttttaaaatgtgtatcatttaccctgtactccctagtggctccctctgtaatgcagaggccttgtttgcagtttttccatctgttattcacctttctcccctccttttggagctcttgatctctagggatgtttttagggagtctttatcccattagtcattgggacagctttggagaagagggcatagttaagaaagggaggatctgattctattctcaactccactacttagcaacagatcaagttgtttaatctccttgagcatcaattttcttttttattaaaatagtaaccaaaatatttgccattaatatttcagtgagtgttgagggaagaggcatcagatgagacactccaaaagaaagcaatttgaaaatcatttaattctatggcaatataaggcccagctgttataaaatagtgaacattattcactcctaaaacagccagagagatgagcggcagaggaaaaccatagaacaaactaagtaaaagaaattgagaaaatgtattctttggaaaatcagatattacgagatccttcagttaaatttatgtctctatttgctagaagagatatttatcagttccaaagcaacaagcctttcccttttggttttattagctacatggtaattgatatgaatttaaaagataggtttaatttgatagcaataactacatctactggcaggatatattttatgtcattgatagtccttttattttccaaaaggatttaccagtttatagtaaaaaaacacgaatgtggataagcttgtgaaagagtaataaaaaagaaataaagaataagaaacctgaaatgatagaggaagaccaacataccttaccattatgagattttatactaagtcctgaggcaatgatcaaagagaactagagcaggagactgacatcttgtttctcatcctagtttatctatcatgtactttgcacataattgttatacttattttattacttaatttattgttctacttgttataattgtccacaagtaaattatccagttctccttaaatttaactctcagaggccgggtgtggtggctcatgcctgtaatcccagcactttgggaggctgaggtgggtggatcacctgaggtcaggagttcgagaccagcctgaccaacatggtgaaaccccgtctctactaaaaatacaaaattagccaggtgtggtggtgcatgcctgtaatcccagctacttgggaggctgagagaggagaatcgcttgaacccaggaggcagagtttacagtgagccaagatcatgccattgcactccagcctgggtgacaagagcaaaactccatctcaaaaaaaataaataaataagtaaaataataaatttaactctcagatttcccctgggagatgcttccaaaacttgttccattttaacatcaatagaattatttgagggaaggctattttgatatatatatatacacacatatatgtatatatatatataaaaaaatacatgaatgagaaaaaattatattcctcattctcttaaagaaacgatagatcactcacttaattagctatatatatatatacacacacatacatatattcacatatatatatacacacacacacaaccaatattgtattattgtattttagtacttttattaagccattttacctgtaattatttgatggggtaaataataaatgaattctagtctattgtattttttaactgaaccttttttgtttttcacacacatgcatgcacacacacatagacaaatatatatatgcttatgtatatgtatatgtgcatacacaatgaatgtatatgtatatgtacatacacatatgtatgtatatgtatatgtacatacacatatgtatgtatatattatttgtatatctaaagtgaatcttaagacaagaattctatttctgttgatagtctcccagaaaaagtaatatgctatttggctataagactggaaatagaacccatgccataaaggcagggccagggggtttctaagtcaaaacaacaacaacaataaaataattacctaagtgatcctaaataaagaaaaagtaaattgccatcaacaattatattctaatacaataagcaataaaatgcacccaaaatttaagaaccttggagaaatatgtggatgagaaaaaattatattcctcattctcttgaagaaactataggtcacccacttaattagcttgttccgtaactttcacccaggactcctttatgatcgcatggaagactgtttgatccttttcttctgctggatcaccatcccaagcacacactcacagaacacataccaaaacactctgtcaatatcaccatcagctccatcacagtaagtagttagccaattatgaaaacaataagccaggcccattatttgcaggttgtgagttaaaaaaaaaagagtcatccttgttgactatttgaagatgagatgtatcctcttaatctttgttagtggtgactgtgtagagatttcattcctggaatactgtgttggttaaaactcagcaaagcaacctcagctgcttgcaaacttgcaaatcctgcagtgttaaatggccaaaatgctactatagcaattttttcttcagttgaattggtcagtttttgccaacaaggatgaaatttacatgattctgaatataaacataagtagtatgatcttgcatcagcatactgaacacggtgagaaaccagcaatcagaagtacgaggctcaggggagaaagcatgtaatgtggtatagcatgcctcagaaatgaaaatctttgatgaattaagaggaggttcttatagttcccaggattttcccaagaagttgatttgtaatccacattttaaagtaacacaattaacttttttatttgaatatgtaaaacaaaataattctatgtttcctgtaggactctaggcattttatattaaaattaacacgaagtatgtatttacctttaaaaaccatgcaagatggcaaagcatgaaatgtaaagagaaaaaacaataacaacatcagagtagaaagttataattgttaattaccttcctctaatgtcccacagtattggactatgggagcattcagggcctttattcactcttaccagcaaatactttaccaagaatagatattttcatatttttttcttcatagcaaagtaatcatatgccaggtactttgtatcttttatgctttcttcacctataaagttagaatcatctaacatagtgacatcataaattcagaataacaaaagcaatacaaataattttaaatcaaatttttagtctatcctatcaaatattgtcatagtgaagttttgttttttgtttatttaaagattaaagccactgtgactttctaaccatatataagaaattatatatttatgtattaaaatattcttctcctttgtattggagcactgagaattactggtaggattgtggatgaaaactacaagtaaaatgcttaaagttgttgatatggtgagatggccagacaagcttttgaaaacatgccaaatttgggggctgtgactttgttttcattctgctttagtctgataaaaagatgtgaaaagaactaagtacagacaactgtttgccccattggtgtagtttattgatacagtttattgtgtaattacattggtatgtggtgaaaaaaggctttcagaggtagaaggctcaggctggagacttgaaagtggtactatttaaatcagataattgagtctctgtttccaaatctgtaaaacagtgttaagatataaaatatcccatacaattgttgcaaagattcagcaaatgaatttgaaaatattttgcaaactgtaaagcagcatgtatatgctgctatcaattttttgacttgttatttttgtagtgacaaaattatttcctgatagagtatgaatttatctctgtagcagaatccactatatatttaggatagaaaagtaaaagatttttataaattgccatgaaatgtcacaggctgatttgcattttctggtgattctatacattaatcactgagtaaccttcagttttccaaataaagaataaagagagtggtgatgacatttgtaaccatctacagaggaattatttaaattcttcacagatggagcgatatcaagggtaaatcattatagccacatttctaattttaagaagctttgagggtgtttgtggatggtaggaagtaaacattgttttgcatatagaattaatcatagactttgcataccacaattccaaatcctccagatgagtgtagagggctttcgagacaccatcccctaaggatcgagaaattcataaaaggaaaataatgttatgctacatgtaatatacaaattgagcaaattggagcaactagaatagtgacctttcaaagaagacaaattagattctgtatgcctcagaatttaatgagtcttagtgctttaggaaggatgacatatgacacatattcttaattctagtctcacaagagttaactttattatttctcaacaagatgaataactcacttcttctttggtcaacataattctacctaatattctctgtaaactagctctggaaatacatgcggaccagtgcttgagatttttagtaaatgtaaaaggtatctgaatggttgtataatgctgctttaaaagagttttaagggttggaacatggtcactgagaaatacacaagaaaatctgttaccaaatgtgctctgaattttgagatgagtaacccgtggaagtattcgctatgggtaacaccacttgcctaaaaccacagaggcaacaaatggcatagcctttctggtcaccaaatctaaatgattttctccaactgaaattaaaaatgtgtttcttgaaatgtactttttataatttctgaattacaaatattttctttatttttattcccatttgctttgtaagtagttctaaattaatatattcttagtaactcctgagttcatatggataatagtaaaaacacaagtaaagagtaaacatactggtaaacccactaatcataattgacaactaccacttgtcatgttcaaatctcattatcctgtgatgttttttctgtttcttgtatcttcttcctaagatttagtttgaaaaaggaaaagaaaatgtatttaatgccagataaataccaccactagggaacaaaaaaaaggtccatttttaaaggactcctggaggccaggtacggtggctcacgcctgtaatctcagcactttgggtggccaaggcagtcagatcacaaggtcaggagattgagaccattctggctaacatggtgaaactccgtctctactaaaaatacaaaaaaattagccgggcgtggtggcacgtgcctgtagtcccagctactcgggaagctaaggcaggagaattgcttgaacccaggaggcaaagggtgcagtgagccgaggttgcgccactgcactccagcctgggcaacagagagagactccatctcagaaagaaaaaaaaactcctagaaatcatttttgttaccatgtttatagcaacacaatagtgaaataggcaaatgcatttagtcacataacttggttttcttgggccactgctttctttcctgtgggagtgggagaaggtacaagcaggagagacatgatgcctttggactgctctgttaccttcagttttgtaaggctcctggctccactgaccagattatgctgatagataagagataggggactagttttctaccttgtgcctgtcctggccaagatgcaaaattaagcctactgttgaggaagaccagaaagttgtttattgcaatgtacccaggctcccagacttaggatgttatttaccctccaccgttatgcagcgggaacttaagatgttaagaacgactcttaccaacatctgctttgttatgcattcattctgcctgcatctttaatttggggtgatagctgccttcagaagctttgggagccgttcctctcagtaaccaaatactgtcccatgggggacatttcctctctgcagctgttctgtgtagggtctcaacagtgtgctacagctggctgtatgcaatgtagtgccttgatgtctccctctctccttgcttttgcagctggcgctacgtacatctttgggaaaagtggtgggcttatcctctacacctggccagccaatgacaggcccagcacgcggtctgaccgccttgccgtgggcttcagcaccactgtgaaggatggcatcttggtccgcatcgacagtgctccaggacttggtgacttcctccagcttcacatagtgagtacagggccttggcctggattttcttatgttactggtggtctgagttagtgattcaggtagacgcagcagaacattctagatcaatatggcaaaggtgcacatgcttataaaaattgttttcagatgtgaaccatcatatttacagggttcctgggggaaaaaaacttaaaaactcttccttcttccccatgtatatagggaggaaaaagaaattcattctttgcaggctcccttcccaactgtgtggcttggcctgtggcagaatatttagcagacttctagggtatatttaagagatttacctggtgtggatcttacctggtgcaagcagcaaagccaagtggaatgttaacaatctcctaggctgggatttggcaaaccttctgtaaagagacgtatagtaaatattttggactttgcaggtcagatagtctctctcagagctactcagttctgcctttgtaatgtgaaggcagccacagacaatacatttttttgaaatgcatgagactgtattccaataaaaatgcatctataaaaacaagctgcaggccgtaatttagtgacccctgtcctaggcttcaagcatcactgtaagagatgtaataaatgtgtgataaaaactgagaccagagtgccagagtgggcggggcaaaagggaaacagaacagtgatcaagagttgagtaattcatgtgtattgcatactcaacattttgcttttggtcttgtacatatgcacttaatagcactgcacccttaatccctgtagatcataagaacacagcaaaggctaagaaattaaaaatgatttagaagaaaaaattcttttgttataaggatggaaaatatttttacagcaacaattaacccattttatcacctgtgcagtctgcagttaagaaagtaggctaaagagagatatgattctcatccataagtacccaaagtgcagtctccaagagcaaagagaggaattgttctcattagttagcaatgacaaggctagaaagaatggatttaatttggagcaataagaatttagtttaaatagcaggaggaaaaggcagttaagaaaaaagatcaactggggattactaccaacctccaaaaaggaggaaaaggaacattgattaggaatctctgaatcagagttttgctaatgtgcaggtgtatagagagaagcagaggatacaatttcattgctggtctctggagttggagatggctggccggaatcatgcatgacaagcccagctcccacagcagtgcgcatgtctgacacttgctcttccagcatgccttggaaatgagagcagcttaaagtcctaggcttgagctggaagtcggtctagccccagtataagccagatcagggcaagactctgcttaggagcttaaggaagaactggttagagatgatcaccttcaaaatgtggtggaggagtcttgaatagagttgtgaacttttcaattttttctcagatgcttcaggaaccatatggtgctatgagcctgagctaacacattttaaaaagctatgccaaggagcaaaaagaaaggcagccatacttactacactttatctttatttggcctctaagaaccaccataatttacaaaactctgtgagatttatgctacatataacttaatgactatttcatggcagctataactaggctgttattaccagctcacttgcatttccacagtgatttatcttctttttttgttcattgtgactgcctaagaaaaatatgatttggcacagacatgagcatctttttgagtcaaatagtgtactattgttttatccattcctgctcattcatgttttgtagaacatctccacttttaagagagaggttttcctattttctgatggtttacttgaaattagcagtgttttaataaaattgtcatgcagattgtggtaacttctaggaggaaccagaacattccagtatattttaatataccattataaagctctgtcatttctttggggtctttgaaaagtgaatactctaaacatactttgagattcaggtaacatccattgtgtgcatttattagtgtgtgtattctgtataagcatacccattagatttgacatagtataatattattttctttgtatgagcaaaattaccagacattttatatcaaaatgtaaagagccccctgggatactgtagacacttgggtgatacagccgattgcttaaacgttctgtgaaagcccagtagattttcctccaaatcttagattaggaaatgatgtcacctgaccctttcagaaaaaaggaaaaaaggatcctatgctgtggggaatctgtgtgattctagagtgaccctgacatgttcatggccctctcgagcaccaggccccttcatgggtctagtcatttgaagccatattttatttccttgcagattatctctttgtctactctgaagaaggcaggtttctcatcatacttgaaagtaaagaaatctaagtagaagactaaatggcttaattatgaaaccagctttttgttttggacatttaagtagatacatcagggaaacaaagccataaatacttattaagatacttttataacttttacaatctgtaaaaggtggttctgtttgttgaatggtttgttttcttgtactaaagaaaattactgaagagagaaagagctttggggccattaatgaaagtggaagggattgagcataaggcagaagatgctatttctccttacagtttgcctagaagagaaacctcctgggaaaaagaaaaagtgatagaagacacaagggggagatgaaggcaggtggttttctcagtttttttactgctataacagaatatttgagatttggtaatttataaggaacataaattaatttctcacagttctggaggctgggaagtctaagatcaaggtactggcaggtctggtgtcttgtgagggcccagtcttcacctctaaggcgagcactgcatcctcaggaggggaggaaccccatgttttcacatggcagaagggcagaaagagtgaacccactcttgcaagccctttttaggatagcattaggcagagccctcatgacctaagcgctttccaaaggtcatacctcccaacactgtggcatcggtgatcaagtttccagcacatggaattttgggagacatattcagagcatagcagcagaatatatttgcagcagaatatattccagggataagggaagaggacagggctctgcctaccgatgtgcttcaacaagggattacatgggggcaaagcttcattctttgaatatgagtgttctttataaaataacaacaacaataaaaacctaaagtactttggtgctacttgtgagtggtggtcaggctagtaaagttggtcaaaaacaaagtacaaactccaaaattagccagcggtgtatatgtgtgtgtgtgtgagagagagagagaaagagagagagagagtgtgtgtgtgtgtgtgtgagagagagagagagagagaaagagagagagagtgtgtgtgtgtgtgtgtgtgtgtgtgtgtgtgtgtgtgtgtgtgttggggagaaggagaagagacaaagaaagtttgtatttttttaactttcaaagaagacaattcctagaaattcctgaagtgttttgagcaacatcaacattgtcgttggaatatttcctttttacccccaagtggacttatttgaaggaagagaaaatgctcttccaagaacactagagagcctgaccctggggtaagcacccactctagaatagccccagggcaggagtggcaaataggcttcatcttgcctgaaaattctcagtgcctcactctctctcttcaagctttacaccaggaagatttatgagaacagcgggcaaatccacaggtaggagatctagcttccattagtcatgtctgccacatgtgccgatgtgaggttttgtgaacgtgcactacacattcatcacatctgctttaagctccacagtattcctccacacgtgctccaattttcccatttcttttcctttgttatcctgaaatccctatgtattaaaatttctttggaaaagcagtatcttaagctcatgttgcactgcaagtcctggaatgatttatcaattcatctgaagtagtcaatcttattgccatccttctcataccagcctaaagtcagctcctgtgacagaatttaagttttgataggagagttggacagaaaggaagaaaagtggccatggctagtttggggatgtgcaatgttgtgtgggatggtagaaatgagtgggaaaacttgggcaaaatgaaggcatttgtgtcctagattgagtaactggggcaaatgaagaaagggtcaccaagacagttgagtgctatgagcacttttcttcttttatgtatgtattttaagttcaggggtacaagtgcaggtttgtaggcttgttacataggtaaactcgtgtcatgggggtttgttgtacagattatttcatcgcccaggtattaagcttaatatccattagttatttttcttgatcctctccctcctcccaccctccaccctcccaaaggcccagtgtgtgttgttctcctctatgtgtccatgtgttctcatcatttagcttccacttataagggagaacatgcagtatttggttttctgttcctgtgttactttgctaaagatgatggcctccagctccatccatgtccctgcaaagaacatgatttcattcttttttatggctgaagagcacattttttctatttcatgatttgctcagattgtctttcattctggccaagggagcagaggctcttatttctcttgctactttcttttaaacctaaagtcttcccactcatctgggccttataaaagttaaataggttttgacaaaaagtgttgaacaacacaggcctttggtcattttaaaaaatcagagagggccaggagataaaaatgatttagaaattgcttgcttcaaattaactaacatttctttgtttttggttcacattccatgatgcaatattttctgaatgaattataaactgttatattaataaaattttgaattaagcatgtttgaaaaaggcaaagagatctttattgaagtatatgtgcatgaaatgagattctgtagagcgagggtgtcttagggtagaggaattttttaaaatctatttcaaatgttagtttccttccattgaaatcgattgttgaggaattaaagctcaattttggagaaaagctgctatcgcttgcgagtgacatctgcctattgaccccacatctaggctttaaggagcggtgtcatgttacactcaccttcatttatacaacagggaaaaaaaactgaataggactagagaagagattggcatgaagtgcttgttattactatcatgaaactcttgtcaacctctttcaccatctgcaaaatagaaggtcggggagaactgggcaataattagcttccctttatgtagttaatgctgagtgtaaaaaagacatcctattaatttctttctctctgtatgtaatttacagtaaatcctcttggattcattttttaattatgagcctttcaggaacagtgaaaatttatgtgttaagatatctgttttgtttgacaagaatctataaccttccccaactatttccttcctgacttaaaatgtagattgttacatacacgaggatgaggggcagacaaagaactgctgtccagactgacccccatttcacggtggcaaagtgttctccttccaaaaactggaactttgaaaacagattgataatattctatcagtgtcatatttggggaaactggatatttattaagtttcacttgtatattattgtttttacatagtttatagcacccaacgagagtcctgtagaataaatggaagtaaagctgaatgatgatgaatggtctgttcctcccatctattgcatttataaattgccagcctggatgcttcatttgggctgtctctatgtgggatatttacagtaaacgatcagcatctgctgggatagtccttagtaaggttaggtggctgttagcttagattcatctctgggtttggccagtgacagaattggatttgagtcaagaactgtatttggggaactttccagtggagtacagaagaatgttggtgtttttgagactggtaacgcaaataaaaaaggaacgaacaagaaaacaacagaggtatccaacagatgcaatttcgtttcccatggagtgctgtgcactgcaggttgactccgtatttccttccatcgctatttgttcttagtgaaaaagacctctttgggatttctgagcttaggagtttttccagatcattagccacttatacggagaggacctgctgggcattgtctctccagctttcagcttagccatgctatcccagcagagtcggagaagaaggtgggagaagggagtagaagtgatgattggatgaagtgactgcttatgtaacctggactagaggcagctctctgcaggggagctggtgtgtgttttctcagatctctattattcccatgatatttctatctaaatctgtttactttgattccacacatggttttgagaggcagcaagccatagtagaaagatgtgcttaatttgaaaccaaaaaaaagttggatttgagttccatttttcaatccatttctgtcagtgagctatgtgactttcagcaagtcattctactacttggagcttcagcttcctcttcttataaatgggcataaaatattatgttgcagggttttctcaaagatcaagtgaaataaaatatttagaagctgttcattatcagcaaaacactgcactaatggagaatggtggttttcctaataaaatgggtgctgtagaggtgatgactgcattagagaaacatatatagaaggaaagttttagtttaattgtttgtataagtctgcttggactttttaggcaaaattttttaatttctgtttcatctgatcaaatgtcaattttatgaattaaccagattcacaatgaagacttttggagcatctctttagcataaagtgaagaagcagttacctctgagggaatttaggtcatgaccttggttaggtcaataggataagtgaccctatagcctccttggtgtctcattatatagcgttgtgtctctatccctgttacaagatgataatgcattgcgcttctattctctttagtataagcttccaaagggctctagactcagcagtgaaattgtcgcctgccttgccctgaagtttattctttaattttatcgaccatgggaaatgggaatatgccactttgcatgaaaacagggaaagaagagaagaaggaagagagggaaagaggaggaggaaggaggaggagaataaggaaaataaaagagcaagaagaagatgacaatagccatgaccatcaccaccaccaatagaagtagtagcagtaggaaagcaaaacctttctagataggcctagtatcaaaatggttttagactctccttgggtaccagataaagtcacaaagagcttggtcgtatactcggggatagagcccccacaaaatgttgctagaaccaaagtcctaatggaggtacagccagactgtggggagctaagtaggtcttgccaccaagtacactggaaacctaaaaccagaaatataaacagaaatacttcatagatttggattccccaaaatatgaaggaaaagtgaattataaatttactatgcaaatgaaatgtacaataatgcaatcataaaaatcaagctgacaaagtgtgtggaaaataggttatggctgataggaaattatgagaaggaaaggccaaatggctatatctttctcatttatggttcatacaagagcccttagactgttagttaatgacagttatgtttcagaatcctcaatgcatacaaataagaattttgaaaaactaagatgaagagaatttagctcctgagcatcattcattttatatatatataaattgagtttttattatgtgtcaggaaaagtgctgtgtgttgagggtactgtgaccaaccttggcttgcatagcataaacaggcttgagaggccacgacaattacaaaaacaagaaattaggttttctactcattatgaggtgatgtatatacaactcttgcacaactcctggcatatagtgagctttcaatcatggatagattttgatattattggtactcaaagatttttcttcaactaactcattttaactcaaaaacttgttatattttattttcctaagcaatgaataaactttaatcaggcctctgaaatttgaaatgaagcaatataaaattctaaggagctgggatattactgatttaaagacagctgggtggcacatatactgggttattgcagttatcaagctagctgaataagttctgaatagcagaagctttttagatatatgaatctaaaatgcaacaagcaaggcaaactctaagtgccatcacgtgaatgctggggctcacaggacttaatggcaagcctcccttaacaccatcagttggatgaattatctcattgacccaccgcttacactgctccttgtcattactcctggggtattgttcagtgcaacagggcaagaaataactcattgactccctgaagctatagatgatggattttagatccctagctgtattcagaaggcataggagctcagtgtattgatgggggaattcattagccacccactccacagaatcagtttcttagatcctggtgctgtcactgctgctgttgcaacttgttagtgtttcagggacagacgtcagagggaactgtataactacattagcctcacagatagtaccgacagccagacctgtcatttcctggcctgcgatgacacctctggagcctagaatcacttaaagatatttagataggccctgttgatacgaccaagctaaccttcatcctgaaatcaattcatactcaggatgacaggaaatgagttgtcattaaggctcatattctatttttgagtccttagttaacctcttataattcagtttatttttcctcctccatttctgtaaaatggcaggtaatttaatgacatagattattacttcctacatttactcgggagcatgtgtttcagagaccatcttacattgataccattactatcactttccgctaatattgattgacaaaataccaggtaccagacactgtgcaagaactttgtttacactgtcttataatgagctcatgaccactcagtgaggtagtcactattaatatcctcattttataattggggcaactaaagtttgaagaagctaaagcattttcccaagatagcactactaataaacagctgaatgggctttcaaatgcaattctgacccttaattactattacacccctaatgaaagttttagagtagaaagcatagtggtaataattttaactcaattcatacttatgaaacagcaatttacttgggattgttggagatgtgaagaaagttaatatctagccggggggtagaggggaatgaaaatcatatgtacgaatctttttaaaaacagaatcagctatataccaaagaaggtaaaaatactgctggttgctgagatttttttttttaatgtacatagatgggatgggacagattttgactagtggaatctgaagaaagagcatacctgatgaagataccagcatgagtgtcatatcaaaggaaatacaggatgtgttctcaaattcatgaattcaattggaccgtaatgaatggcataagaaaagaggcaggtaatatggattagcacaaagaacatatgatttaggggcaattggtctctgattcaaggtctagttctgcctccaactagttctgtagcctcggatgaattatttgactactccgtaaaatgcagatggcaataatgccaatttgtagctctgtgaatatttataacctatggaaaaatgcccagtgaattatctggtacatagtggatgttccattaatgatagccatgttcttgtgttttcttcccaggtactttagggacatagtgtagaagatttgagttttataccaatgatcgattgtttctgaaagcaaaaggaagacatttaaagatttttttagaagaagatgaaatgcccagcacttaatttttagggagattattttggctctgttaaaagaatgttgttcagtgggttcaaggaaaacagcagggtcttgagtaagtgtttctagagaaacgtctttaaagacttattctatgatgatgcatataggaaggtaatgaggataaaaccaaagaacagttcagagattgaatcggcaggtgttgtcagcaggttggattaaaaaggagagaactgagaaatgtctagattgggaaggttgtgatttcattaccaaaaacaaaacaggggacagataagtaaaacagataagagtttgactttagtgatgcaaaacataaggcatccaagagccaggctattgaaatttccaattggaaatacatgatgaactcagaggagagataagggctagaggtgggggcctagagaattcacagcttggcagtgacagtggaaggtttaaggagtgctaatgtctcaagggagatgaataggaacttgggaaatatatacatatttttatatatttaaatatatattattttatatatttatacaaatatatataatgtatattaaatatatacatatacaagataaaggaggaaaggaagagaactaaaaaggaaaggctagagggtaggggataacctagatagtgaagttttacagaaatcaaaacaaatgagagacttccaaacacaagttgttccagagctgttttttctatacctgttaggcctctttcatctgaaatcagtttacagagatgtcttcttcatctttattggtatttattatggtgtaatctttgccacttcagtcctcttaccagtattctgcatttcttctctgtcacgggcatcattaactttgagccagaggacccagcatctactcctagagagctgccaccaattagcagttaccctatgtaaatggtagaggtgtagctactattctgccaccctcgtaatattgtgggaaaaatccaatgacagaatgcaagtgagcatgccgtgtcatcattgaaaagtcctacaaaataaataaagtcgtttttatatcaatattggtatacctaccactcagcacagctcttggtacctaaggagatggtgattggagacctggaaatgaagaccaaagagatgctgagatggttgtagtttccaataggaagattagcaaccaggcaagtggcagatcagagcccaaatgtgagtggctcaactgctggaccctgtaagctgttgtggttctcaaatgatgtccttatcttgttcatctctcagctcttggcacctcaccttttggagcttcagtttggaaagggcaattcggatttaaatcatactgcagtttcctaaatagaacaaatcccctgatcctagtgatcatgtgcaatgaggcatggaatctgattacccttatcattatcttagcttggatagctacaaacgttactaaatggttatgaaattatctagccctttattaagtgcaaaaggtagtacttaggttactaaacttttttgaaaataattccgctggctgacttttcatggctaaaaacccatattcttatctgtggagtgtatctttttgtaatcacatctgtgtttgctgtttttttaattgtccaggcagtatgttagccattttgtgtctatcagcccatttggtcctgacaacactgttaaactagtggcattacctctattttatgaagtaaaaaattaagcctaagaggattaagtaaccatttgttaaaggtgttaaggaaagaaaagaggacttagacttaatcattgatatgtttgttttcagtgtcatagatatagatatatactgcttttcataattttctattcaatataatataatatatatgtaatatatgttggatgtgttgaatttagcaggacctgtaatatttatttaaatccacagttaagaatgataaacaggactagagaatggaacacagaattttggctaaagcagcatacataacttaaaataagtcactttctttttggattcaaagaaactcattttacattacattttttgcttcccagtatttgtttttctcaatgacgttaaggcacctaattacccccaagccactttcttaaatactcctatgcaaaatgaaaagattggcctggagactaatctgaggttttgaatgcagtgcggtagaataagtgttttagaggtaactttagttcccaaatctcaataaaaacacttccaaatttagtgtatcaaagaaaagattattggataatgcattctcatctttcggtgtatgataaatgccatatcagaagtcctcaaatactcttgattaaaaacgctaaatgatctcaaataacacaaaaacccatttattcctactggagtcagtatttaattttctatatttgtaatttaaatccagatgtgggtgtcttcacagcgaccatggcctgtcatcccttggtctgttagcttctaatgtctagcagcagagtatagtaaatacttgaaaggtagaccttcacactgaaaatcacatttattgaagtgggagcagattccatttaaattgtcccttacctgatgcctaattcctaaggttaacaggttttcatgtttgctacttatatcagcagtactggagctggtttttttgcatggctaaacagcaaagcttaaattcaatactagagcgtgaaagaggaaaatgagttttggtgtgacgtgtgaatgacgtggttttcctaaataccatgaatgcacaatgaatgatccacaaagcacagccgcctcttaaaagaagacaaaaatctccctgaggtttagttgagaaaagatacaggagcatatagcaaaaactacaacatgatacacttacgtaagatgcaggtgggaagaatagaatttccaaattaaaattagccaggccagcagaaatgagtaacctaatgttatggcttggatccgtgtccccatccaaatgtcctgttcaattgtaatccccagtattggaggtgggccttggagggaggtggttggatcatgggagtggtttttaatggtttagcaccgtccccctagtgctgtccttgtgatagagttctcataagatctggttgtgtaaaagtgtgtagcaccttcccctctctcttcctcttgctccagacatgtaagatgtgctagcttcccctttgcctcctgccatgattgtaagtttcctgaggcctccccagccatgcttcctatataccctatggaaccatgagccaattaaaccccttttcttataaattacccactctcaggtatttctttatatcaatgccagaaaggactaatacacttactttcgtgaaaacaacttttctcttaaccacctcctactgtctgtcaagtgtagttctaagtgcttgggatccaagagtgaaaaggatagacaaactccctgtcctcatggtacttacattctagtgggggagtccttaatgggcacaagcaatcagaacttcaatttgcagaattttgtgaaaatgtgctatcatatatattttattaattaactagttaacaggcagggaggatctccttcaaacttttgttttcatctttgtatttttctttctttgccaaatttccactttaatctctttcattctaatatgctcacgagtcacttaatgaggaggatatgttctgggaaatgccctgccaggcaatcttattgttgtgtgaacatcatagagtgtacttacacaaacctagatgttatagcctactacactcctagctatatggtatagcctattgcatccaggctataaacctgcacagcgtgttcctgtgacgaatactgtaggcaattgtaatgcagtggtatgtgtgtagctaaacatgtctaaataaaaaagcacagtaaaaatgcagtattgtaattttatgggaatgtaacaacccagtgggttctgtttgtccactgcccagatggagccaatttatcaagacaggtgaattgcagtagagaaagagtttaatacatgtagagctggctaaatgggagaccaaagtttgattatcactcaaatcagtctccttgaaaatttggaggctagggtttttccaagacagctcggcaggtaggggtctgggggatgggtgctgctgattggttagggatgcaattatgggatctggaaaatggtccttatgcactgagtctgcttctgggtgggggccacaggactggttgagtcaagagttgtgggcccaggtgggggacatctgattgtcagaagtgcaaaagcctgaaatgacatctcaaaaaggccaatcttagctgctacaattagggatgttcattataggagtaagtgggaaagttgcaaatcttgtgacctccggaataatggttggtaattatttaactctgcctgcatcttagcataattcaggtgtctctcatcctcttaacctggtggctttcattagttttacaaagcagtttagtttttgtgaatggttattatcatttaaactctaaactaaatttctcccaaagttagcttggcccatgcccaggaatgaccaaggtcaaagaagtttggaggttagggcaagatggaattggttagatcaggtctctttcactgtcataattttctcactgttatatattttgcaacagcagtttcaggaccaccttcacatactcagtctatcattaaccaaaatgtcactgtgttgctcatgactgtaatcaaaaaagcacagagagctctctcgctatctggttctatttctaccaccctgacaaccactatagtttgttttcaacaccaaaagaaaataacaaaaaaatagcatcttcaccctcgattctagtttcttttttcttgaaatgactatggccatttctattatttcattttgaaattgtgcagaattccttctgaacatccatctacatttcacagacaacaaattgctaaaaacacctaaacaccactaacctgggggggagaaaaaaaaacaaccaaaaacaaccaaacaaaccaaagaaaacaaatcaaccaaatgaaaacccaccctctctggtggaaagactgcaccatttttggtaaagactttgcaatcctgcctagactggatgactgcctattgccctaacactttccttcctacccccagttatttacaagatcaccccttatggtaacagtattagtacaaatgaggtttttccctttacttaactgaatgctagaagaaacagaatggaaccacatgttccctttgattcacacccaaacactgcaaaacacagagtattcgcttcctttttcaagctgtgtgtgcacattaaacacatgcaaacattggactgaaacagacacagtaagtcagctctaggggaaaactatagaagtctttttattttgtttctctaaatctcaatcttttatttaagctaggtctttgcagagattcaaagaatgatattttgtaatggttctccaaagagcagttagatgtgtctcatccaaatttgtgtatttaccttatcatcacagatactgttctggaactgggaacttagcattagctctcttcttagaaatgactattaatttttgataaaaagaataaaaaacaccacattacataatggatataagagaacatagacggcatgataggaatattctgcctgtgtttccatgaattgcttctttgttaaaaagtgtttggtataaattaggccagtggtgtcccagcactttgggaggccaaggcaggaggattgcttgaggtgaggtgtttggtataaacagtatattaacaaagaattctcctatggtataaaccctaactctagcaggaagatcaaatttctctttgaggcatgcagtctgagctccagtgactctctgcaagagaaaagctgatattgtcacattgtgagtcatagtgactcccaaggatgtatttgtgtggatgtggttggtcagaaggctttgtgtgcactgtgacatctttatgctgcagatgccaagatcacagggtccacacagagcagttcatttcacacagtgggaaatgatgcgtgtgtgtgtgtgggtgggtgtgtgtgtgtgttttaaaaaacctaaacagagcaacactgttctgtgcactcaaactctacagctaaccgccaagggccatcttataaatttggacattgaattgctaaaatttgaaaacacagccactcctattcacactctaccatctggaaataaaccctaagtcactgtgggtgtccatatggaagtcactgttctgcttccttttatcttcatggtagttcaaggttcgatttcctcctagggagactttctgttgttcccattgagccagctctgctgtccccactggtcacgaaccggatcagtacatggagattcctgagcatatgcagggcagcggcatgagagcatctaaaatagagtcattcccattgccccagcacatccttccttcctacattcctgggagaaaagagcagaaacaaaggcttttctttcttctctcttttggatgtttggtgatttgcatacagaagttaactcacttcatctactggattccaatcattcccttcctggttcctgatcttagagtacagggtgcttcttgccttccccttgtcaatataagggctttagaaaacgtgcccagctggtattctttaaacctcctccaacgcacaaatatatttttaaatgcagatatttcatatacaagttgatatttctagtttctttttgaaaatcggaaggtttaactctactgggccagtgttattcatagcattggtcaactggagctgaggagccattgccatttttatggatattcttttaagccccccaatctccaccactccctgtcacctcactcagcttcatccatctgcctgacccctggagacatttgattttgtgcttcctctcacacagaacttgtgttcacaatttggggtcataccttcacatattatatgtaaacagcactctggaacgttttcaaagtcacagctattttaggtatttagtttagaagaggttagaagttgacttttacattagtatcttaaaggaatatatttgcctgctcagaaacatctggggcccacatattcagatctttcgtacatataatttgctatatagcataacacattgaatgattttgactcagtagctcgacttattttttgtgttcttttaaaatctttcatattaagcatagaattgtaatttattgatgaatattttattttctgagaaaagttggttattattcttaaaatacattacctataatgttcatgtttcctatgttttaatatataatattacaatattgatgtgtcgtgattttttttggttgttctctaattaggggtctttatatgaatctctgattacttagcagttctctgaagggggcagtctttcagagatgcatttaagagctctgaattctgttaagaatattaaggaacacaatttttaatctttactttttactccagggctttgggctgtctgtatcaaaatgcttcagatacttcctctagggattgctttgcctgttccatccttaagagagtaaagaatttcttctccccaccaccccccaactcctgacaatttcagctaaatttttttcttccattgctttaggccattgcttcaagttatatcaccttctgagactatgaataattctttcccttcaattatattgttaccttgaaggtatttataggctgtgatcaaggcccctggagtcactgctttggcagactttataaatttagctcttaccacttctcctcacattttttatcttccagcctttgtagcactccttttgtgtgtgtgcgtgcctatctgtgtagcttctctgatattttaatatccttcctaaactagggaggtcagaatagcacatcatattccaggtattactgtgagtatcagattttagagagtgaaatcaagggagaggattaccttgaaattgaacttaatctattttgtgactcagaaaaatagacaaaatggtagaaaaagctaacggggcactgtcaacatgttttcatatattttaacgtactgttagagcaatcctggaagcttaagggggaaatgatgatttttcttagagagaattctggcttccattagatgcttgaacgtgtcctttagagtaagattttctttacaaatccaggcttcaaatatggctatgtaataagatgggttttttccatagtacatgagctcttaaatctgtattattgttattattattattattaatattatcagacctgtctttgtggcttaaaattaagaaacatcattaaacatttaattttacaatgaagaaaacaaattgctacgtaaaccatcttgctactagctttaagctctagtccaggtcattctgcattttgtcaatatagtaaattgagtaacagcctctgagggccctgcaaagagccaaggcccaatttaactccctagtgccagggtctccaaatgtttttggttgtctatacatactagaaaaaaattaactctgcaccaattaaaaatatgtatatatgtatgtagaatacacacattgcttatattatcacacatacagaaacatcaggcattttaaaagataagattagatacatatatatcccagtattattccctgaagttcccatgaaccaaccttggcacccctgtggatgcccaccccaacttggagaccactgctgtggtgggaaaaccatggtgacaaacggagccaccaccctcagcagttcccaggaggaaccccagtatcaatggttatgtactgcagagcctataagcgaatatttagttcagacactcattttagatatgaagatatggaggtgcagtgacttacctacctatggttacagagttggatgatgagaaagctgggtgtaaaatgccagccttctaatttatcagatttcaacacatgcagaaaatacatagtgttctgttttagctggaatctcaggaaaatggggactgaggtcctgaatgaatgatgaagaaggagagggtgaatcaatttccaatcggtggtcttaaaggtgaaatattgttagcctaagtaatctctactcttttgtgtcccttctattaaactctctttacaggttctctctctctctctctctctctctctctctctctctctctctctctcccacacacacacaccccaagataaaatccaaagcttctgattcaatagccaacctcttcagcaagaagagcaaaggttctgcagccagattgcctgggttcaaatcctgatcctatcactgaatagcagactttaggcaaattatttatctatgactcagtttcctcatccgttgaaattggggataaaaaagttccataggggttgatgtgagcattaaatgacacctgtaaagcactcggctcactgcctgatcccacgctaatggccctttatatgttagctatttttattattttattctaattcttcctaaaagcttaaagcacagtccttcatatcactgcatcgcatttcattttgtaacatgttcttgtgctacatgtttcaccatgtgctacatggtgaaaggcattttcctacccgctttacaaaaacagacaccgaggcccatgtttagggccaaaatcagtgctgaatgccaggacagactcccaattcagtgtctcgtatcaaactgcatttcctttcaagatgaaaattgttactcaaaaccctatgcagctgggcgggaacacagattccatggtttcctttttcttcctgtttccccaaagcaaagcatctcctctctttgcatgggggatctatccctccagaagtctacccagcctgaggataatggcagctgcagggttacaggggtaactgtccatctgtctgaattctcagttgtgtgagagcctgtgttacaaccttagtagcttctgcacctcactagcttttcccactcccttggagtgcttccattttctccagctttcggtatcagggagtgttattaaatgataaggagctggctggctggttgtgtattgtgagaggctgagaaacaatgagtgttacaacacattagattgcatgttagctctgattttgggaactttgtatcacagagctcatcatgcaacaggactgcatctgggatactgcctcccttccccagagggttattaatgggccttcatacctgggaggacagattacaggagagatgtgataattagagatacttcactgatcataagcaggcccccgagcaccaagggctagcagctgtgttacacatatgaggcaagctccatgctccagagacaaaagtgaagtagaatttgctgcagtgaccttacctaaaagaggtcatctcaaaaatggtcacccatggacattgattggcaattggtttgaatagagaaagagtgttctgagctgaggatcagaagacctgagtttcatttctagttctgccatcatagagctatagggtcttgatgaagagtcacttaacttgtgacagtttttttatataagaaaaatgggagctacatatgtcttacttatcacaagagattgcaactcaaatacttcttcttccaaggtagtagggtggcaacaagagtgtgtgtgtgttctgacgataaaggaaatataagaatattttgaagcaaaagaaggagccagtacaaaggcagaaattgacaacgcatgggagcagaagtggataaaattaaccaagctggggcagaagaaggcagggaagggtgagagaaaaacagtagacggcttaatgtcatcaccaccacaacaaatgatggtgataacttgatgctggtgatgatttggagctcttcctatggagtaagaaagaatgcaagaattgggtcattgaccagaaactctgaggaggaaattaaagaaaattcatatctaggtgtcttaaacttctcagtaaagaaagttttaagctcatcaatcaacaggggcaggggtagatttagggacttgaagaaagtataagatttttagaatgatctctttgggggatcccaaaataagtcaacaaggcatcttttcaatgttgtcttgatctcggagtcagaacaacttgggtttcaacctagctctatcttttttcctcctagagcacccttaagcagatagatgcccataccttacccatcagtactttagggttataatctatatcttgcaggcatgttatgaaaattaaatatgatcacatatgcagtgtgcataacatcatgtttggcacatagtagcctgtcattattttggaaaagtgaccataatgaaagagaatgcatcaaatatataggattgttaaataacaatgtccaatttagaagctgagttgtgttggcctatctgcttgcaccaagattaaataatattctttacaggtgtctacacctttttctctccaaggcatgtcttcagcctcagtgctttcatggctcatattttctcctctcatgctttcctacctgctcatatgatgaaccacatagaggaggtgattctccgaggatttataatgtgtttcctgtgctcctgaattggtgccaatggcacaccaatccagtcgggtgggcctcaaggcacaccttgctcctgactgagaaggaaaaaatctttgtggagtttgcacaggtataccaagtaattgagcatttgcattagtatggaaccacctactacagacaccgggctcgtttcactcaaaggatagcctagaataagcatgaaggacctcctttcagaatcttgtttatgtaaagcccttcttggatttcctctttattatattttacataattgatcacaaatgtgaacatctatggaaatgagttggagtataggcgataattaacctggaagggaagaaaacccttcaccagaagcaaatagatacccctgcaaatatctggtaatttcggccgggcgtggtggctcacacctgtagtcccagcactttgggaggctgagatgggcggatcacgagctcaggagatcaagaccatcctggctaacacgttgaaactccacctctactaaaaatacaaaaaattagccgggcatggtggcaggcacctgtagtcccagctactcgggaggctgaggcaggagaatggcgtgaacctgggaggcagagcttgcagtgagccgagatcacgccactgcactccagcgtgggggacagagcaatactccatctcaaaaaaaaaaaaaaaaaaaaaatctggtaatttctctttcattagaaagctccaagtgaggtacaaactcaattcaaatattctatgagaataaaaacaggcttatacccaaagataggcaataacaaatgctggtgataacatggagaaaagggaaccactgaacactgttggttggaatgtaaattagtacaatcactatagagaacagtttggaggttcctcaaaaactaaaaaattgagctaccatatgatctatcaatcccactgctgggtaaatacccaaaagaaagaaaatcagtatatcaaagagatatctgcagtcctatgtttgttgcagcacttttcacaatagctaatgaatggaagcaacctaagtgtccattaacagatgaatggatagaaaaaatgtggtacatatacacaatggagtactattcagtcataaaaaaagaataagatccagtcatttgcaatcatatggctggaactagagaacattatgttaagtgaaataagccaagcacagagagacaaatatcatacgttcttacatatttgtgggatctgaaaatcaaaacaattgaactcatgggcatagagaatagaaggatggttaccagaggctgggaagggaagtgggggttgggggaggtgggggtggttaatgagtattaaaaaaaaaatagaaggaatgaataaaacttatctggtagcacaacagggtgactgtagtcgataataactcatctgtacattttaaagtaaagagtataattggattgtttgcaactcaatggataaatgtttgaggggatggatactgcattcttcatgatgtgattattgcacattgcatgcctgtatcaaaacatctcacatacttcataaatatatacacctactatgtacccacaaatttaaaaaaaatgaataaaaacatccttcaaacgaagtggctattttgttgcaaaaaataactattacttctcaagcactgactgagtgccagggtgtatatgtatgtgagtatgtgcgtgtgtgtgttttgttctgttttttctcttgtaaatccgtcaaagattgcaaaggtaggaactattatcctgatttttcaagtcagaatccaaaatttagtgaggttaagtgacttgccaccatgcttgctgctcacaagtagctgaggcaaaatttgaatccattttgcctggagcccaagcccaggttctttctcctaactgggatgtcctgatgcctacacaatctgctcagtgaattactcagcctccatgtttttctattctatggcacccctacgtcatactagccactagagtgaaaagtgataagatgaaaccaagagattgtcttatcagcttctccattcacatgtcttaaatgatttctacctttactaacaagagaaaaatccaggtacattctggggaaaccattagtgcttagttggtaaaatcttgagacttttatcttactagtagaccctcaacatttttccaaagaggcactaatgtaccctgtaaagaaatgacatttttcgtctcaaaaaaaagcaaaaacaaaaaagaaatggctacttttcaccctaaaataaaaaagtgtgtgtgtgtgtgtgagagaaagagagagagagagagagaatgaatctatctccaaatgccaatgagcatgatggactagtggcaagactttctacagaatatgtaatttggtttaggcagggcaatctcctttgtatgaagtaaatagtaaattcagttacagtatatataaacattaagaagaatcttcttctgtttaaatattgcttcttaaaatttgttttgctatttaaaaaattcattttgaagttacaagtgtctctcctaaggagacaattctctgacaaacataaccaactggcaattacaaatcataattgtgactcagaccaatattaagtgagcaccttcctgctttctcgtagatgaatgtctataagttgttagtgcacatactgaactagaaagcccacatcaggaaggtactgctctttttttgttactgttaaatttgcttggccaactcagaatgaatatccagatttctcaactcttgagttagtggatatataaactccaaaaaaattaattaaaattgaagtttaaattttaatactgagaaaaatagttgattagctagaaaaatcaccctaaacataattatatgtatcagtaagtcaaggaaaaaattaaatttgtcaataggtccctattctccagtgctgtcttttcaaagttactttgcaaggtattcagttttagtgctaacgtatcaatcttttttttttggtgggcgggggatgggggcagggtctcactctgttgcccaggctggagtgcagtggcgccatctcgccttaccacaacccctgtcacccaggttcaagtgattctcctgccttagcctcttgagtagctgggattacaggcacgtgctaccatgcccagctaacttttgtacctttagtaaagatgggttttcgccgtgttggccaggatggtctcgaactccagacctcaatgatccacctgccttgtcctcccaaagtgctgggattacaggggttagccaccatgcctggctaatgtatcattttctagaatacatttatcaatgaaattttcaaagaaccttattggtatggtgaattatgtaaagtctcagaagattacttttgactttccacggccagatactcttgactcacttctatcaatcatgcattggaaatactctgacatcgtcaattctaccgtgatctactcaagcatctcacctgtttccttccagaaagcatgttttaatgttggagattcattggctagtaaatgtatagtgtcttaaatgatgtcaaatgaagaaatgccaaaaacatgcccaacaggaacagcaaagtatttaccttcatgtgtaaaatgccagtgtgagatagcccaatgtgatattgaactggatcaatggtggggtgccagcacatgaggaatcgacattaattcaagttgggacacagaagttggcattgtgaagatttttaaattctaggactaaatggatgatccactgggaggcaatgtccagacagatcaataccacacaaaacgttaattgcttttcttggtgaatcctaagaaagtgctggggctttagggaaattgagagagatttcttttcttccccctccacaaaaggtaattaatgagtacaacagacaattcaaagcaagaaaatagaatctgaaagcttgaaagccatacattcagaatccatttagagatttacagaagggctttagcccagaacagtgcctacaggagctacagtggtgacagtgtctccttgatagatgcatcctggaatcttctactgggcaagcatccaaaaatatttgaacaaatgaggtatgccttccagcatagctgggtagttagaaaagagtcaaacatatagaaaaaaagcatagtgactgaagtcatcttaaagctagtttacaaatgtagtctgaaatacactctatcacgggatgaataggtatggattttattccaactatgatctactgtgctttctgggactgtaaaaagtgactacaccatccattaataatatataggaaggcagtttgggaatgtcaacccaaagcctcttcgtaccttgaaattcccatgcaatttggttacacagagtatatcattactcaggttaatattataagacaagtattagcattatgtttgaacaaaggttttcacaaggtctatattaactttacaaaggttctgctgtatactgaatgacaaaggctgtcacagtagcgaccaatttgttccaatttgcttacttctccagatctctctgtcagactttaagttccttgaatatagggtcctagtcttcttgcccatccttgtatacatggtaggtgttccatcaatgtttcttgaatgaatgtataaaaagtgtattttaattgaaatcttaacaagtatgcattaaatgtatagttggtgcttggtactaattctctcaccagtttattgaaatttgactatatttgagcttgaaatggtatacctacagatatagatcattaaaaccaaacaaaaccctttctttatgatatcaagagatttgcctcctaacataaaaatgaataatcactgtctaccctaatggattagactttcttcattagcctcctgtttcttctgagaaatggctacattttcagaaactctgactcctaaagggggtcagtaactctgggaagactatttctattacgtgaaaatttcaaataatctcctagaaacttgaaaactggttatacacagaaagcaaaagaggtgaaaagtgagttgcagtttcattaaacatggtcatcctccaacaccgtctttcttaccagccttgcatgaaacgtcattaagatgcatcttttatgcaagggaccaaaaagggtactacttttaaaatatagcaaaaacaggggttgcagttgcccttttattgagggtcagtttatatatgtagtctgatatatatttcatccagaaatatagttttttaaactttttatcgtgaaataattttagatttgcagaaaagttgtaaagattatatagtttctttaaacccttcactgagcttccactaacgttaaaatattatgtaaccgtgatacatggtttgaaactaagaaattaacatctgtacaatacaatttgctcagataatcccagtttttccactactgtcctttgtatgtgtcagaatccaatccaggataccacattttatgtagctgtcctgtctccttagtttcttctaatttgtgataatctacaaatactttttaattgaaagaattatctaaacgtatatttgtcagatcaataccgtcctttctatctttcctttctccactgaacttgggcgtcagtctctttcttggctactaactctaatttatgcattggatattttactactttgggctcattattttaaaaatctgcaagcagacacagtagtctaggactgttcctgaggctggagggccagggtatagcatgtgcgcaggccaccaaggccagccttgtcattgattctgctttgttaccaagcaactgagatcgctcccactaaagaaaaagaagcaccacttccacttcaaaggtaaatgtgttgaaaaaagaacagaattgacacagcttcctttatcccttaggtacaaggatgccatgcctagtcagagttctgaattcaggttctcaaagcaggaacagggagatgcagcagctgcagttgggaactcttctttctttctacattttttttttctttttgaaagtccacatctctatcaatccagaatcctaattacatatgatataaagggccctcaaaagacccattacccctgttaaagtatgtaaattcaggggcaaattatatgaataatggctaacatttattgagcgcttattacatgtcaggcactgttcttctaagcattttacatttaatccttacaacaaccctgtgatgtaggactgattattaatactattttacagataagaaaactgaaatacacaatagataggaaaattgctcaaagttgcacagctagtaattgaataatcttccaaaatcttttttatttaggtaatagtatttttgataaataatttatatattttatgaagacctttacaatgatggtgttattccatttccaccctagattaaattagcatcttgagaaaaagccataaacccagtgatcaaagtcgatggtatttattttatgtttaaaaggtgtcatctctatcgagtagtcaagtgctaaaaaaaaaaaacaaaaaacaaaaaaacaaaaaatccagtcaacagaaacttaaacacttgagggcaaacattgagcaatgttggggttttgttaccttgcactaattttgggtttaagaagggaaggaaatgatgttcgtaatccagtgttctggaaggaggagtgcttttggtagattaatttacaaagttttctgctgacaaaagaaagggaaaggaaaaaaatcagataataattccctttacaggcctaatttgaacttaattctctctctctctctctctctctcacacacacacacacacagacacacacacacacacacacgacaactgtgagctgtaaatccatggtcatctagttactagcgcagtaagagcagttgtctgatctgatcaaagagtgtcatgctccaaaaaatctgatctgtggtgaaaatagattccccctggatactatccagggattagatattttcagagaccaaaaatacagtgaagtgccctcagcaagatagaacacagtgtagtcattcttggtgaattggaaggattttgccgcagggctgtcattatgaacatcagtgatcattgtaagaatatggaaaagtgctagtgaataggagtcccaattacagaacactgggtgatacagcctttgctataattatagtgtgtttagattgatgggcctaatgagcagtgttccttaatctaaatgttgattttggagcgagttaaaattagaggtaaaactgtgatagtaagtttgtttactagattgactatgtggctccacgtagaattcagattagttcaactaacacttcctcagcaccaaacccttgtcaggccttgggctaggtcctggagacccaaaagcagatgaagtcctcagggagttacagcccagcatgggagagggcatttcaacggcattagtaatagcagtggatatgaattgagcctttgccagatgctaaacacttgttctaaaccctctgcgggtattaatccatttactcactccaccataaccccacaaagttgggactaggtgagaggggagccaacaggcctggaagactacagtaacttttccaagcttatatgtgtgataagtggcagagcagagcttaaacctggtccggaccttgggttcttaactctaaccttagtattccagagaagatttcaatatacagtagttcactgtcctgggaccaagaagaggtacaattaaccatgttgcctatgctgctggtgatgaagccagaacgtaaacagaatgatttatcctcactcctttgttcgtgaacaaaggaaccataatcccccatgaaccattctggcctctttactatcctccagacaggttgatcttgtttctacctcagagcctttgctcttgttgacctgagtgtcccatcccagataccgttgtatggcccttccactcaatcctttcccacctccctccaaatgttaccttattaatgaagacttccctagctcattctattttatctgcctttcttccttatcccacctccctgcagttccttctcccttaccctgccttactttttcccacagattttaccattagcaatactattaatttctttttacttgggtttttgttggtttgtgtgtctgcctccccacactagaacacaggctcccaggggttagtgactttttaaatattgtttgtcactgaatttccaatgcctaaaataggacctgaccacatctgagtttaatatatacttttagatttagtgaattaaaaagccagaatgaggctgggcacggtggctcacgcctgtaatcccagcactttgggaggccgaggtgggtggatcacgaggtcaggagctcgagaccagcctggccaacatagtgaaaccccgtctctactaaaatacaaaaattaactgggcatagtggtgcgcccctgtagtcccagctacttggaaggctgaggcaagagaatcacttgaacccaggatgcagaggttgtggtgagccgagatcatgccactgcactccagcctaggcaacagagcgagattctgtctcagaaaacaaacaaacaaacaaacaaaaaaaaccaggaagaacatattccaaagtgtttaaaatagttatatctgagcgtcggaattatactattttaaatacacttttaccaagtttcctataatgagcatgcgttctatgagaaaagggctaaaaatagatgaaagttaaacattagtcactaattcatctcataaacctacttactcctgggaactattaacttctgtgttattattgcacattgggtttttatacatggtagatgctattatcgaggatcccttggggaaggtttgtgtatgaaatgatcatttctttcctgcttactccagattgagattgccagccttgactcacctgagcgggagactcacatgtgagactgcccgtgtgaagagcttccactgtgatacccagtaggcatctgaaaagcatcaggtccaaaatggaattcttgatcccccaacctgctccttacagagtgatccttgtctcagtaattccaacatccatcagttgtgtgatccaaaaacttagaactcatacctccctttcctcatgcccacagtttgttcatacaaagttctatagaatctacctcccgaatacattcaaaattagaccacttctcactgcaactcaataccatgctcctcacttccatctctactactcgaagccactcgagtcatctcttacctgaattgctgcaagcactttccagctggtatgtttgtttccaatcttttatttcattattttttaagagacagggtcttgctctgtgtcccatgctggagtgcagtggcacaatcatagctcactacagcctcaaactcctagagtcaagtgatgctcctgtctcagcctcttgagtagttgggactacaggcacacaccattatgcccagttaacttttttctttctatagaaatggaggtctcactatgttgctcagggtggtcttgaattcctctttctagttttctctgacactctcactccctgccaatcttttctcctcaaagaagccagaatggtattttttaaaaaatataatcagcctttattaccaaccacccccaattaaaatcctcatgtagctttatattatattaccaatccaatctaagtgcattaccaaagctttgaagaccctgtttgatcctacctctcaataccctccagaacatcctcctcgtctaccactttcctccacatctaccacaccctgggctgtttgtcaaacatgcctggtttgttctagctttgagcttttctctgtctgggagacttcttccttcagcaccagagctgacttttccttgttttatacatagtgagatgtcagctcagatgttacctcctcaaaatgatctttttgatcatcataacttagtaagctctctccctccaccagtcacactgtcccacatctcttcattctgtccagtattagtctgtaattaccatgtgcttacatgtttaatatctgcctcacttttgaatgaaagtatcaaggggaaaaggaatgtgactgtttaaatcactgctataacttcagtatccaaaacagtgcctggctcatagtgaacccttcataaatagtcactgaatgaaggaataaaggattggagcaatgaatgtttttgtgacatctagatgaaaattagagatgataaccggtgcaattttgatcatctatctcccttcataccagccaccctaatctaggggactagaataccgaaagaaaatttgcttctacgaacaaggtaatgtcatgatatggactgactcatttatttgttcatttgttcattcattccttcatcattcttcactcatcagacatgtagtgaggactttctttatattaggccccctgtgtttggttttctgtcagttatcttagggtcgtgtgtgtgtgtgtgtgtgtgtgtgtgtgtgtgtgttaaaggacgaataaagtaaataaactaatgcaatgtaagaagtgttgtggttttttagtaaaggttataaatctagacttatgtgcgtattgttttgagaatacaaagaaaggtgcttctgtttctgtttatgggaagtcactttacagacatttatctttaagtcatgatagatgaatttctcatatgggcagttttcctaaatctgagttttagcataatgagatctggagaaaaagaaggcaaaaaaaaaaaaaaaaaaaacccataggaaatgatacagagactaatgatcatttacccaaataaaacagataccattcaaagttagacactgagcctctggtaatccctgttcttctccttcatcttgagcgagggatactgaaaaagactgggctggctactgtttaatcagggaatgatgaatacttttcattagcccaagaaaagttagtttctattccagaaatattttgtaaagaccagttaaaattattaactattatgcatcacttgtcaactataggaagcattactgcaacctctccatagatgattagaataattgctgtcctttcatctttcccatctaacaatactcacccagtacctcccactttcgtttgtgtcttagtatgctgcatgtatctgctttgctaagagaacatcaaggcttggcataattgggctatttccctgtcatactggtttgcttctaaatctgcctcctctgtgggttgcagtgaggtcaatcagatgcagtcaaatggcagagaagatattaaaagtacatatatcctagaactaaatatacaccatctgtgaacttcagttacaaagggaaacttctcttaatatgaccttaggtaaagccattggcagttttattgtatctgtcagcaatcaccaatagctttgattaacaacatgactaatacataagttatgttggtctctttttttcataaataataagagatagggtttctaccaacacaacatttctcatacttgcctgatcattagaccaactgtggcacctgagaaaaatatgccacagacctactaaatcaaaagttccaacaggcctagggatctgtatagttcataaaaactccaggggatttgattatcaggcgaagtttggggagctttgtatgaataatattcaatgaattgtttgtatgtctgtccgatgctttccagactgggttaatgcctgggtctctttctttaattaagctttgattaagatgctcccagcaaatcccacactgaacatttccattgccccctccctcccccgcttctactatgagagaccgagatccatgtgaggtattctgtgatgaagatcttgttctgtttttattattaagcgtacatcttccccttttctgatattaccactatgcatcatcagttaagctgtcaccaacctgacctctgaggcattggaatcattcacttgatgaagcttactttggcataagctaagggttaggaaaaccaacagatttctaaaatattgtgcatggaagggccactggaagtcctccatcacagcctgatagctacaaaaatgagggaacaaaggcccttgagggacttgccaaagtcaaatagtcaattacagtgagagtttggactaaatctcctggttccaattattacattcttcctatgacaccattccctgattcctacaaccaaattagcctcctctttgagctttagttttccctctaggaaaaaaaaaaaaagcatgttagacgaggtcagggactctaaaactgagaccctaggttcagttaaaatgctgggaaggctactgtgataggggtggatgtcggagaggaaggacagaggtggggcttcccctagttatatttttatctgattgggatattgaaattatattaagaatttatttggaaaagccacttctgttactttttaaaaaaagatgtagaggcacaaggctagatgttgatccttgagtgcagatctgattcttacatttggagatccttagaaaagaagtctgtgaaggcaagcatttgtccttttttgtcataaaacctgattcttgggtattcagtgaatgacactcattgaccaactgcaggtctggcatgatcatcacaaagaattggcactttgaaagtgagagaacagtgggaagagaaattcttaggaagcaagctatcttttctaatcctctttaaaaggccaaaatgttcacaactttcccctaaaacagaaaggtgacattgctccttaagcagcagtatcatgcatgctgtcctctgccttcctaagaagtgcagacagagggcagaccctccgagtgaagtacctttttttcttatttgagcctgctctgcattgagggagagtttgacacacctctttagggttctgagaatagttaacagctctaagaaagagatttttgttcataagaaaaaacaagagaaactggaagcagttctcattcatattctctctctcgccacaccccccaccccacctcctcccgcctctccctctccctcttcctctctctccctctcttcagtatctaatgtaaacccaggctttctttatgttctgtgcagttggcctgagttctcttctgttttggtcaagattcaagtggaaaagacctgagcctgtgtctgcctcctttctcctaattttggtttctaatgttttacccaagaagggactagacctttgtttccctactcctttatcatagcatgctggttctcagaccttttctgcacactgctaacatccttctcacctttctttgcttggctttttttttcactgcaagctctcccatgttcatttctcatttgccatcagatttagagtaactggcttatggcatcaaagaatgaatcagatgggagcagctaagtaaactgaatgaagctgcttcctttctcttttcccatccacaaatgataaaatagcctgcccagccaagtgacgtggcattcaggggttatggtggcttggccatttgtttaagtttgcttatttgcagtcacagttctttagtatttcagtgatttggttatcactcaacagtgcacacatttcttctataaaatttgatagttacttatctatctctgatttttccctctgtgttttattatatctagtttaatttttcccctttgttgatttctgttttgtatatcttgttgcgggatatacatggaagggagacgagtttccaaagataatatagatcccagtttgcctgtaaattgataacaccatttggaaacaaatcttaaaacctcactgacacagcataaatagaatttacagatcttcttgaagcaaatccaaatctccagactctactttctccattctcccccactcatcctaaccttcacgtacagggaccgcgttaccaagtgagccaactagactctttcacacctctctgcctctgcacatgctgttccttggccagaaatgccttttttttctgctttacctgacacatttagattagtcttttaagacctaatagaaatgtcaagtgctctgatatgccttcccagatgcccatgagcaaagtcagatgttctgccttctgttcccctatggtactttactgatgtccctgtgacagcttcctgccactccagcccactcagttgggagaacttcaagaggtgaacaaagttttattcctttttggattcccagtgtctcatagaccttctgggacatatggcacattcagtctagctgaatgaggtgatgaatcaatccacttactctctccagtgcctgaaacttctcaaggagcttgtgctctcctttgctcctctcttttcaaccaatctgaaaatgcttttaaaagataatgtctgttttccagtgcagtcttctcacttggcatgtaatttctccatttttatttcctttgtgaatatcaaggtacaatttccatagctaccagtctaacctggaatcttttcatctcagttttggagttccacaacagtgtcctggtggatctatcttctatatattcctactataatgtacactcttaccaggtaccaatcagttgtttcaaaccacatttctactaaatgacctctctgaagtgattctgaactggcttccctattagatgaagaccaaacctctactctaagcacttaagacaaatggttgcattcatctcaatgctccttactcctcaatattatccattacatttttttgagacagattgttattctctgacagattgttattccttcatcgtccaaaaggagtcctcactttgcttagactggaacacaaaattttatctattttaatgttccgtcatataattataattatattctgttatctattccaaattttcagaattttatctattgcaaattttaagtattccaagttataaacttacgtcttccaaaaagactaccaggattaaaccaaccactgaatcatcatttcattacttcatattactacaagttagatttgggacactgtaatattttagccctgattttgccctttttatagtgtccatagataatttaacttctttgtataaacttccattataaaatgaagttttttatatatatatatgtatatatatatatatatataaaacattacacatttaggacatttcatgatgaaataaaagtgtttcaaatagaaaatgatggtttatttgggtttataaatcaagaattctcaagagggtatgaaacccacttctcccttatcaactctagggattttctgtagttttgaaatttgaaaagcataaagtaaaattattatcattttgatttgcttgtagtcataatatttaattcacttagaaatatcaaataacattaaaagaaaggtgtgaaaatggctgcgctcagtggctcacacttgtaatcccagcactttgggaggcccaggtgggcagatcacctgaggtcaggagtttgagaccagcctgaacaacatggcgaaagcccatctctactaaaaatacaaaaattagccaggtgtggtggtgcatgcctgtaatcccagctactggggaggccgaggcaggagaatcgcttgaacttaggaggtgaaggttgcagtgagccaagatcatgccgttgctctccagcctgggcaacaagagtgaaactccatctcaaaaaaaaaaaaaaaaggtgtgaaaaatagggtagaccacgtgtgctgttacagtagaccccaaacataaaagatgtttatctcactcatatacacagtccaatatggttccagttggtgagggttagggttgtcattctgggagttggccagtagagatgctaccatcttcagcatgtcttccaaaagcttcctggtatcaaaatccaattgttgaaagcagagagaacatgaataagttcatatggaaggattttatggactaagactaaaagtagtccacattaattcagttcacattccactaaccacatggacacccctaacttcattggtgactaagaaatgtagtctagactattcccaggaataagaggaaatggttatactggagaactagatgtctaatatatattaccttacatagttatcaaagtcatttttagtttggacatggtctttactaatgggttgcaaatgctctttatgcagatgttttatgttttatattactttcctatgcccaacagcataaaatatagaagtctggatggattaggcacttgatgtgtgtattagcttttgattgctatgtaacaaatgaccacaatgttagtggcataaaacaacatatgtttattgtgtcacagtttctgtgggtcaggagtctaggcacagtgtgactaggtccccagcaaggctgtaatccagtcgttgatcaagactgtatttctcatctaaagactcaacaggggaagggtctgcttccaagctagctcaggttgttgtcagattttactttcttgtggcagcatgattctttgaagaatcaagaattcatggttgcttgcttcttcaaagccagcaacagagactaaatcaaatctagccagatggtcttatataatgtaagataactacaggagtgacatcccaacacctttgtaatattggttaagcaaattacaggtctcatatacattcaaggggaggggattttacaaaagaatgactaccaagaagcaggatcactggagcctgtccaccacagtaaatgactgaaaaaatctgggtattccagagaactaccactttacctgaacatagctctttacacaaaactacacagaattatgaaagatctcaagagaaaagtgttccttattgccaagagctggttattatgctagtaaaatcagcagtgctcaggaacaatatttgctaagtttcacagttatcaaccttaacccacacaatcatctttagaattggatccagaacaagatgggaccatcttaaacctggtacattctcataaggttcattctcataagaccctaaagccttcattatatggcatttttgaaactcctttgtcattttaaatttttgtctttcctagctcccttttcctctactattctatctaacttaggcagcattgaatttcatttttttttctccttagtctttctgtttgacattttcccttctagcttcatttgtcctttaagacaaccccataacctttcatctaggggaaagaaatctaaaagaaagctctagaatgagattttagttgacatattcaatttgctttagaggggcatcacccatacctcttcttccactagtgagatctcctgagaggtgaaaatatgagagaatcagagctgcttatttatatatcaactatggaaagatctttcctgcctaatctgacctcttctttgaaactccaaaagtgactttttgtggttaattcttccaggatatctatgatgcagtcccacagatattaaaggttcagggcatcaaactgaaagatataacagctctaatagacagagtcacatttctaaaaaggaaaaccaaattctgaagatattttctggctctgtgaacagctaaaaatacaaggataatcgttcctatagtcctggacttttaacacggaagctaacttggaaggaaaaatgacactgagctataggaagagaagaatagaacagacttcagtgaaatcggccgcttttcttttcaaggcacttattcctagattagctcatctatctttaagtttcatatgatttttactatttggcatgacttaaaactaccaagttggtgaaaggtacataggaactctctgtactattttgcaacttctatgtgtctaaaattattttaaaataaaaggtagcaaacatacaaacaaaacaaattattgagctgggaagtgttccccttgcaaaagtctagcaactggggtaaaattgtttctttgaatacaaatgcctagtctctgattaataaaataccaggaagaggaaaagaaggagctgaagaaagagagaaagaaatagagaaatggggatttccagttgctgtagatcttgagtaggcaggaccttagcacatggtatctaggtgcatattgcctgtcacttttcaattatctttgctggccctgcctcaatcaaagcccaaaccataccccaagggcactctgcatcgttgaatttatagatgagatctttcttttgggataaagagctattctcaacttgactattataccttggccttcattccctaaagaaaatgggcagggaggcttgcagacagaagtatatagtgtggaaaatgaaccacctcttttgactctttgcaagatttgtgatgtcctactgggatgcctgggcccaggcacattcaccttgattctacatcagagacttctgtgtcttctttctcatagtatgggttattgggttgagcaaatactttgtcatcagtgtgtcttatggagtaattgagagccttggatttgaactcatatctatttgggctctattttgggctgtgtcacttatgaactgcatgaccttgagcaaatcactgaaactctctacagtccagattcgtaatctattaaatggggctaataatacctcatgcatatggctgccaacgggagttagtgaaataatgtacatgaaatatttaacactaaacttggtgcctaatgtatcttcagtaaatgataactattgtcatagtcatcattgcttttatacttttcggcttccagtgatttccagtgactacagccctaaggccattgggggatatcttttttataactgaattttctttataaaacaataactgattttttttttttttttaagacagagtctcgctcttcttgcccaggttggagtgcagtggcacgatcttggctcactgcaaccttcatctcccgggtacaagtgattctcctgcctcagcctcccaagtaactgggattacaggtgcctgctaccacgcccggctagtttttttgtatttttagtagagatggggtttcaccatgttggccaggctggtcttgaactcctgacctcaggtgatccgcccgcctcggccttccaaagtgctgggattacaggtgtgagccaccgcgcctggcctaaaacaataactgattttttaaagaaacatactcatgactatttgtcattttagtcaaagaggatggagaaaaacagggttcagttttattttcagttcaatgtttcgaccatgacatccagtgctggcttgattacattttaggaaactgaattccttctctaaagaaatagtccaaaattaaacacatatggttactgtaatcaataataatgctaaccaagcatgctggctcatgcctataatcacagcactttgggaggcagaggcgggtggatcatttgaggatcacaggagtttgagatcagcctggccaacatggtgaaaccccgtctctactaaaaatacaaaaattagccggttctggtggcacggacctgtaatctcagctagtcagatggctgaggcacaagacttgcttgaacctgggaggcggagttggagtgagccaaaatcgtgccactgcactcaagtctgggtgacagagcaagactctgtctcaaaaataataataataataataatgctttgtgcatttcaaaattactaaaagagtgtaatcccaggacttttggaggccaaagcgagcagatcacttgagatcaggagtttgagaccagcttgccaatatggtgaaaccatgtctctactaaaaatacacacacgcaaaaatattagccaggcatcatggcgtgtgcctgtagtcccagctacttgggaggctgaggcaggagaatggcttgaactcaggaggcggaggctgcagtgagccaagatcccaccactgctctacagcctggccaatagaggaaggctctgtctcaaaaaaatatatatatattatatatatgtgtgtgtgtgtgtgcatgtatgtatatatatatgtgtgtatatatgtatatatgtgtatatatgtatatatgaaaagagcagaatttaaatgtttttaccactaaaaaagatatgtgaagtgatagatgtattaattagcttgatttaatcatttcacaatgtcaacatatataaaaaatcacatcatactccgtaaatatataaaattgtaagtcaactaaaaataaaattttaaaaagggaaacataataacttttattattttgtatttttaaaaatcaaagttaggacacatattgagtttctctgctactcaatgaactgaaggttttggaaaacaagaccaaaaaacaacaacctccaaaaaagaaataaaagaagatcatagttaaggcctttcatgcagtcagctcagggatcaagggtagatctcaacccgcctgtcactgagtatgcagtgctcacagatgtggggaatacctatgtacatcacagtcctcagggaactgtaaaaccagttgcattgaccaaaccaaaacacgtgccattagaaagcatataattgtaaaccaagagcttcttttccgtttacctaagataattgcagaggctttagtctaagagaatcaaagttaagtgatagcactgtcaaaaaggtttcttaaggaagaagatctaggggttctcgggattcgttgaatttgatgccatggctgaaaaattaagtggagatacactgtatgccattggagtcaggcactcatgtgaaagatcagcactcacatttaggaattggatacagctaacagcaggggaattgataggctcatgaaaagagcatgggtagaggatgacatagaaaattaagcacagttagggaagacttaccagccaggttacaagaagcaaacacctatcccaccgattcagaataccttgcctcactcctgcatgacaggacatgtgtgttctttacgttaactgagaaactgaggccagataggaagacagatgtggccagaagaagttgacattagtaatgagagaaataaacgaagtgattttggggctggcgttaactatctagaactacccaggagggtagatttagagacacttccatctttgaaatacccagaagtctgtttctccaatgccttgactctgcctaaagcagtctaccattaatctctgaggaatctcttcaaacagctttctgccaatgtatcactgaagccttttgagaaataagtgctgttccagcttagtcatatctcaaggcagcgtggcatgggaggtggagactacgagtaattaaaaataactcccagctcaagcagggagagggctgtccctgcctcatctgtattcccatcacaggctccccagtgagaccccagctgttgagcaagagactctgtagtgtctgatgcactcaatcttgagttgatcacaaaagaatgttaacaacgttaagggcatggagttctaggttttggaagaattcttaatgattctgttaaagaggaagaaataggaaaaagaccaaaaagacagggacaaacaggaaaaacggacccagctctactgcagtaatagccattgatcactttacctcccttggcagtctgatcagtttcactggaaagatagcaagtggaaaaagtgtgcagagatatgatgtgaaaattatattcaagctttagctccccagcacgtctctaaggaaagcactataggaacagctgctggagatataaacaaaggcccaggaacatctctgccattcatgtcaggatctgagagagccaagggaaggacaagaggggaattagctcccagacatgcttgagtctctaagctgttactccgtgatccccatgttctaggtgcagaagcattgcgtctctaagcaattcccttaccaccagctatctaatgctgtcagaggaccaactatttgctgttaacagtaatgctcatttgaagctattcagcctagattttctttgtattaggtaactgtttaataaattaattccaaacagtacctcccatctctctcagtctgaccattgagcgctcttagtcaatctttgcaaacttgtccccatttagttgttaaacctgctccatcaacccaataatgaatcaacctatatttgaggactatggtttgtgcctgctccaaatcctatgttttctctgatttcagaccccttgcctcaactggatgaacttttcaagctcagaacaaataagtgttaaaaaacattattaaacaaacatattcacctttctacaagtttggaaaataacagctaaggaaaaagcttgtaatcaatattttttgttgttgttcttgttgttgtttgagacagttttgctcttgttgcccaggctggagtgcaatggtgcgatctcagctcactgcaacctctgcctcccgggttcaagtgattctcctgtctcagcctcccaagtagctgggattacaggtgtgtgccaccatgcccggctaattttgtatttttagtagagatggggtttcaccatgttggtcaggctgatcttgaactcctgacctcaggtgatctgcctgactcggcctcccaaagggctgaaattacaggcgagagccactgtgcccggccttataataaatagatgtatcaattgtagcttaccagcaccaaaaacaatagttagtaagagtgtggagtctagaatttgactgtttagagaaattatgcctcatcttggggaaaatttcctaatgtgtccaatctcctgtttccttatccataaaatggagataattgtaggacctcctccagatgactattaggaagagatgatacatataaaactcacagcactgtgtcaggcataaaataagtaatctataaacaatgttatttaacacttttatgataaaaatatagaaatagaaaataatagtttcagtgacagatcaatgttgaagcctcaattcaaaacataataaaattgctctttatggttcttacgatgtacatttatttcaaatagtaacaatgctgttcatggtgaaacgtattgattttaagattgagaaattggacaaacaaggctagtccacaatagtgggattgcagtagaccctagaatatgtataccactttggaaggtataattaatatgtttatatgtgtcgtccccaatctttccattctttattaccaccattatacctccatttactccacagtccgtctcttctagaatgaaagctcccacaaatcagcaattgcatctgtataacctattctgtatggcataacacctatatacttttccaaaaagaggtggagagaatatttattgacttaggtatgtctgtgatgatctaatgaaatgtcatggaacaacttaaagtcatagccaaaggaagaggaatgttaatatgtaagaatttgcagatagattattaacatggaatgatgccaaaatagcacagtagaaaaactaaaataaattaaataggcctggatttgctgggtaacctggggtataaccccataaggatggtgtatgtagaagaaaagtcagtgaatcattagtaattcataaactgtgttttttctcaggtgttcaaacattggaaagctatcttttgcaacctgatgctttccctggaatatgcagtgtttcttgactcgtgcagtaatggctgatggagtaggtgttcagacattttatttgttggttttatgtatccaggtagagaactcctgtctaaaattatcaagagttggtggtgcattcaggacaggaatttagattttctgactccaaggacatttcaccacccactaaaccaccctttgccatgagctcccaggaagagcaattgttcagtctggtacagtgagggaataatctgtccctagcacaggaggctgaacacagcagtgaataaaagaagacaaaaccagttctacaatataaatgacacattccattaatacaagtggatccaaatgaactaatttcattcaatagtactttcacattctgtagctatatgggcttggatacaaattgtaatgtcagtctgtcaggagagtggatggcagtgcataattacaagttcttgttcagcacttcaggagctaatcagagcaaggatgtgaatctgtaatttgcaaatgtgcaaagacagaggttactatggcactaacgactctgctgataacattcttgccaccacatcataggactgtgagcacaaattctacaaaatcatttgacctcctgtttagtcgtttgcaagaaacagcctgctggcagtacctagggacatttataagtttaatgttgttcaaaaatctaaaatgtcactatacaataaattaatacttacattctaagggactatacacaatcgtaaagcaatatatagagcaaattaatacataaaatacagagaaatatagaaaattaatatactacatcatgcaacctgcttctaaacaagtgtttctttcataggactgaatcaggaaagattaaataaggagttgagtagaaacatatatagatatgtagagatagagatataggcaatgttttctttttttttatttttatccaccaccccctccccccgctccccaccatagcatttctgctttaaacacttattctctttctctaacaattttattcattttcgttcttggggcagtagaaaaacaaagcagcattttagagttcagtactggcctaaaattcaagcctctctctaaaagattatagaatttcgctgtcctctcagttcacagcagcaagcagaataatttctgcttgccattttcctcaacttagtcctgcaaaagtaacatcattggtctctgcttctttcctcccattattacctgatcctgctctacagcagatgcttcctcagagaaagaaatacctcgaacatctccatcaacttcttcatggtagtaacccttaaccctaaacttttcttgtgtagagatgggtgcatcatgttgaggattcattgaccattctgttaatatatgaatttaatcaattttaattttaaagaatcaggagtgattacgtgcatcacaactttcaggttaaataattttatcatgggtgctaagctagaaccatggctcacctggtcagatggctataggagagtcagcacaatagaagcttcaggcaatgtgaatcctgctgctccctaccagggatcaaaactgaggtcactgtgtggtatgtggaagtcaaatgactgcttctctttaaaaagtgttggaatgatgcgttttctctcaccgattctgtctagggggtaatgtgctagggtgcagtaagttaagtgttagtcacatatttgcagggttaaatcttagttccacagctgactcactgcacactctaggcagaattatttaactccttcagtctttgtttcctcattcaaaaaagaaagagagatactatctgtggcagagcctcagaggattgagggagttaaatgtaaaaatgacacactggtgcctgttacagggagggctccctgagaagcagacctgtgggctaagtttagcatgcaggatgtttattaaggtgtgcctttgagatcaatacctgtgaaaagtagggaaagaaagcagatgaggcatagggaaaaggtggactgccacaggcaacccagcgaacctcaccagcagctctggagctaaaatagctcttcagaattgtccagagttgggctgaggaggccagaattttatttgtgttcccacgatgatgactcagtggatggggtcatttcaggaagagagcagggcatcaaccttgagcaagaaaggtcactgcagcttagtctaaccctgaagaggctggcagctcagggcatctgttgacagtattccaaggaggcagggcgactagaactttagcaaaggaagatggcacatcacagtgatcatcacagtccccagtcataaagagtagtttcttacatgtgcataccccttagccttgttttcatttctcctcctcccgccttcctgtcttcctcttcctctcccttccttttcttctttttcttcttattttgattttgttttactttatggaattaaacctccataattctgtagtgtgccaagtatgagggggaaaaagtctctttcccccattaatagataatgacaccttgacagataagtgagcaattctgcattgattcattggggaaaactatggcaggaagtgggtagcagtgtttagcgtggcataaaatacatatgctatctaaagaggtggcttctttcccttctgggggatttatgtgcttaaatcagggcccacaaactcaaagcacgcatttgggctaaaggaagcttggctaagagtaaaaggagagccaacagggaaagggccttgtaggctgtgacctttcaagctaaactgcccctagagaaagagagacttatttgaatttacagatgccttaggactccagtgagccacagctctggctcttttcctctggggcactacaaagcttaggtctttgcagatcaattaaagtcattagcgctccatctaatgaatgttgatttccatgaggaggctgagccagctggcctgccctaaacagcgcaaaggcaagcagggtaccagagttagagcaaatggcaataagccacttgaattagaaggcccccagcttgcagcagagttaatgctgcctgttttccaggtgacctcaatcactgcctggggcagacactggactcagatgctctccagtcacaagagagtttgtaaatatgatttaaaaattgtcactggctgctcaactagcaggagtgttcagaaagctgcaaggtatgagacactggatgcacagatgtgttttcatctggggaatgttgcatttttacaattttctctcctggctattatgatgggagatttctagtttttaaattcagtgtgctttttaaatttttgaatagataataagatgattgcaaaaaaaattaatgctgcctctcatttctgttcttcatctactcaagaaaccagttattctttttgtgtgattctagagttttctgatatatgtacaagcaaaggaaagtgtatagtctcatattctcatagtcccacctactaaacaaataacaacatactgtatatataattctgcatctcgcttttcttctcttttaatatatcacagctgccttaccgtatcagaacaaagagaaattctttttttttacagctctgtcatatttcattgaatgaacatgccttatttacttaactgttcctttactgtttgcagttacaaataatactgcaggtaacctcaaatatgtttcattttttacgcatgtttgagagtatgtgttgaatacaatctcagaagtagaatgacttctaggaggtatatgcatttgtaatttcaatagatagaaggattgccaaattgtccttgagaagtattacacaaatgtacagccccccccccctcaacgaatgggagcgcttccccacacctcaccaatagagactgtggtcacacttttagaaatttgtccatctggtatgtgaaaatggaatttcagtgtagttttattttctttttcttatgatgagtgagattgtacatctgtttatatgtttaggaactttttagaaatcgtttgtatgaactttctattgatattttttgaccacttttgtagtagtttgctgcttttgtttttaattgatttctactagagagactaatctccatgatatgggatgcaaatatccttttcctcccctagttttttgtttgccttttgattttccttacagcttttgcccctgagcttttagattttataatgttgaagttatcagacttttcttttatggcatccttatttcgacacttaattagaagggaggacttcatattctagagtggtaaagtaattcttcatggttttctcttagcactaccatgttttgctttatattattcattttcataatttttaatgtattcctgtagaggacgtgaggtattgatacaaatttaatattttttttcaggtggctacccaattatttcaataactatgtttctataagtcatcatttcccatttaagcctctgttatgatattttaaattcatttctgcacttttattctgctgtattggtctgtcagtgcacatttttcaattctgaaacctgtacaatagatttcagaatctaaaagggctaattctcccttattactttttctttcagagttttcctgactttcctttttttttttttttttttttttttttgagacagtgtctcagtttgtcatccaggctggagtacagtggtgcgatctcggttcactgcaacctccacctcctgggttcaagcaattttcctgcctcagcctgctgagtagctgggattacaggcaagcgccaccacacctggctaatttttgcattttagcagagacagggtttcatcatgttggtcaggcaggtctcaaactcctgacctcatgtgatccacccgcttcagcctcccaaagtgttgggattacaggcgtgagccacggcacccagcccacttttcttttatatttttttatagaagcattagagtatataagcagtttcttttaataatttgtatatgttagcatatgtatatataaattagataatgttaatttacaaattaaggagagctataacttctatgacctatatgtgtctttctatttagtgacatgatctgtctctccttttgcttaaattttattttatataatttcatatgtctcatattttgttaggtttatctctaaaagttttttcttctctgtacctaattatgaatggttcttttctgttattacttctactaatgagctgtgtgtgtatatatacatgaagatcatgaattaaggcatactaattctgcatcctgcttccttacagaatcttcttgttaatagtaatcattttcagttgtttcttctgagaactccaggtgctcagtcatatcatctaaacataattttatcactctctttccagttttatatctccaatttctcttgtttaattgcattagataataatcctatctaataatatagtaatgatattgtggatactttagcctcgttactgactttagtaagagtgattctgatgtttccacaatcattatgagcctggcttttgcaaacatatacatccctatggtttcttaacactgaatggtctggtccttacattctcaagttaaatcccgttagcattgagtattctttataatatagaactagatccttgtaaacaatttaattattttctttttctatgccacagaacaattaacttggcattaaaattctctactctttaaaagcttggaatgatttatctgtgaccttttctgggcctcgtgctttctttttctaagggtggctcaggtgacagacaacttcctccatttcatcaatggaaatgaataggttttgaatatgtatcccctttagaattatttttaggcaattacacttttctaggatattctctatctcccaagttttcatatatatttgcacagagttagccaagactatttttgtcatttttctgtgcttattttccacttactatttttaaattttatgtatctgcaattttcttcctctttttcatgatgagataatctaatgtttaccctttttaatttttttgtaacagaaactttaaatatattaattttaccacttttgcatttcctagaatattaaattctccttttccctatatgaattggccctttatgtttttcttaaacatattttatgtttgtttaaaaattttgtattaaaaatattgaattgattttgttattttctcctgtcaatataaatatgtaagaccaaagatttcctctaagcatggcttttcctgtttcccatagattatagaatatgagtgcttttacatttttattgttctaggaaacctgcaaaatgggctgtattacattcgacccaagaattaagagagagttttaaaatttctgattggaatgggattctgtttccgatcttgttgttaacatctagttattacactgtgatcagaaaatgtgtacaatagtatttcttttttttttttttttttgaaaaagttgcagttttctttttggactgcatacagttacatttgtgattatcatgtggattcttaaaaagatttttttaattttcaatgcataagtctttaagtgtactgtttgatataccttataaattatgctatttaggtcaattatagtcttacttttgactacttcatctatcattgaataagcaagatgatttaaagtgtcttatttctgttttttggctgaatgtttcttcagataactcttaagttttctgttttttgaatgttatttttatttcatttggttcataactagttataattctgacaccttcattgcgaatttcatcttttaacattttaaacaaaaaggtcttttctcaattatttaaaacctgaataccactttctctgattttaagatccctatcgctgatttatttttgtttgcattcttccggcatgccttggttgaacctcttattttcaacgtgattaacaaatttaattgttttatttatttacttatttattttaattatactttaagttctgggatacttgtgcagaacatacaggtttgttacataggtatacacctgccatggtggtttgctgcacccatcaacctgtcatctacattaggtatttcacctaatgctgtccctcccctagccctctaccctctgacagtccccagtgtatgatgttcccctccctgttccatgtgttctcattgttcaactcccacttatgagaacatgcagtgtttagtttctgttcctgtgttagtttgctgagaatgatggtttccagcttcatccatgtccctgcaaaggacatgaactcatccttttttatgcctgcatagtattccatgttgtatatgtgccacattttctttatcactggtcattagagaaatgcaaatcaaaaccacaatgagataccatctcatgcaagttagaatgacagtcatcgaaaagtcaggaaacagcagatgctggagaggatgtggagaagtaggaatgcttttacactttggtgggagtgtaaattagttcaaccattgtggaaaacagtgtggcgattcctcaaggatctagaacaagaaataccatttgacccagcaatgccattactgggtatatacccaaaggattataaattattctactataaagacacatgcacatgtatgtttattgcagcactgtttacaatagcaaagacttggaaccaacccaaatgcccatcaatgatagactggataatgagttgttttttaaagcaagtctcttgttcatagcacaaagttggttctgctttgtgatctattgtaaaagttgaaagtctttgtcttttaataggtatattaagccagtttatatctaattatgtgatagatatatttgttcctggtcctctcctgttactttatcatatagtttctctttttcttattttgtttgtttgcttgtttgtaatgtgttctatgcatgtctatatgtatgttttgctatttaagagtttgcattttctcccttgtcatttttacagttataatgtattatatttttagtgctcaatatatttaaaccagagcttctcatccaatataccacactcagggcttttggatagaccctctggccatgaacaatcttgtcttctcctctcagtctcgacaaatatattatttgctttttgacctatcatttgaaaaatattgggaaatgtcactttaaggaatatgcactagctctttactatgagcagtgaatcatctttcttaatatttaatacagaaaaaaacatgcatgtattaaaattaattgagttgatactttatatattatcctttgactcctagcaatcagataatttacttcctactttctgtcctcttctaactatttttagttgtattacttctgtattgtcagggtttattccattttcattctggtcttcagcatattattcccattaggttagacatagttcttctttaaaaactatactctgtgcttaccttcaatttcattgtcatagttattctaattatgttttggttgatcaaagtcatttcctagtagtttcctcaatattcccagtgttcctgaaggtaaataccatttgtaaactatcattgagtatagtttggctggatataaaatgttgggtcatattttgctttttgttgggaggatgtttctataaacttattaatacagtcctggtgagtcagagaagcctttcttgaagaggcattgtctatgtttaatctctaatggatgatcgtcacagaaacatagacagaggaaatggttccaggcagaatcaatggaattgaaaaaaatcatggtacttctgtggaacaggtagttggatgactgtaatgcacaggggaaaaggtagacacaagttgacactggagaagtaggaggggatagagcaagaagaacttgacagaccgaggagtctggattgcttccaggacaataatctaaactgcagagtggtatgaagcaagaaagggatatccggttgtaactgttcatattaagaggggtgcacaggggtatatgagctttctcttccaaggagcctttgagtcctcatctctgctgttacagtacagacccagaatttcttatgtaggagagtaaatacatttatgaaataataatggaattcattttatgctagggccatatttctaactaccttccaatgtagcaggagatagcaagacttaaggatatcttagtctgactcttttaaaaaagaaaaaataaagaattacagttcttgggtatatagtcttgtacctctgtaatctgtgaactgtctttcttccaaggatcccatggaaacctttacaaatctagctgatattcactatagttctaaaacatttccttccttagctgttccatggggagttttctgtgatctcgcagtttcaagctactttttggggaccttccatacttcattcaggtgggagctgccatagttaactagtttcggagcacaactctttatcaaacactatatatgtaaaaaactgccatgttaaataccacttgttgctctttcatcttcagtcagctatatgcaaaataggtctttacaggcaaatttacattctatcacagaaacagtgactatcagataaccaactcccttctcaattcttttttttggcttgttttcttgcttacttgcttggttgctttctctctttcctagctgaatagcattacaggccacttctaaaataaactgggttgtggaatttccactgaaggctggagatgaaaaacatactcatttacactgtgtgcgaacttggtggactaacattggttaaactttgaaattaagagatttttttttcctgatttttggccatctctttaatgcaatttcaggtagccacatggttcttaaaaccccaaatgcagctatcttcagtaagtacaaaatgaaaatatgttgcatcctaacagataagaatttcttctttctcatgatgagagctgttacctaaaggagcaaagctttaatggggtctcagcttgattttgccatgtttatatacaaaagagatgaggcaagctttgttttgaagatgttaattgattctgtccaccatgctgtctaacagccaattccctgaaaatgtagtgatggaaaaaaaatctgttccaattactgtataagtaaaatgcttcccttccacctccactaaagaaaaaaatggcactcactgctcaggatctgagatcgacagctgattctgcacatgcaaagccctgctgccatttgtcatttcaggaactgctttatttttgtcaaaatggaaggaaaaaaaaggagagagacattatacagacatcagaattcaaatcatttgcaacctgatttgggtaatgaaggctcaaggcggagttgagatttagggactaaggtggttgtataagtatgtaacttcacaagaatctgttttagacccagagcagattaatagccagattacaatggcatttcctgggcttaggaatctcattatcctcttctttcatatttctttaaagtggaagacccttccactacggtggtgtcatttgaactcaagtgtcaggttcacatccttgtgccctgaagtttcaaagtgtccagttgctgtaggagctttttctattctgatattactgatactgagactggataggaagcataccctgtttagctgcacatctaaataatcggtaatgagaacatccttgacaaaactatcttgcggaggagaggtcaggtcttacctgcatgcctgcgaccttcagcaaacaaaggcagagatctaaggagaaaacaggatgtgggatgtttccagtggaccttggcagtggacttgctttgtgtttgcaatggaagaaggaactagaggggggataacctcatggttgtcttttcttctaaatttctaagacaaccagtgaagcttgaggccttttctccagaactatacaatctttgcctccagcaagctctgtttttactaataaccagattgtcaggtggaaaactttttctaagtggaccttacttctctaagtaaaaaaacaaatcccctgaggcatgaagacctccattttacacttttgttatatacttcacaggtacctgaaatggttctggacaaaggatatgatgatcgacaataaagaaatcaaagatcatattcataattataaccaacaaaaaataattctggggataatattgtcaaaatggattccactgcaaacaggcagtaggatttactttgacaatattctccccagaattattctggatatcactgtagggaccaaaggagagtttttcccttggccttccaaagattctctgaaaaatcaacttgcaaaatgcaaattgatcagagaaaaagtgtacacatttatttaatgtgtatacacaggagccttcaaaatgaagacccaaagatacaggagaaattgttcatttttatgcttaggttcaaccaagtgtggacatctgtgtagaaatatgattggacaaaaagggtatgatctaatggtaatggactgaggcagaaaacccagcgaggcctggccgtgtagactcttcttggcctctctgagcccacattcctttttttctgggtagggggcaaaactttttctgaaatgggggtcttatgacctataatcaaacaaggtagtcaggcagtttctgcgtggtcagtttttacacagaaaggcagagggaaattggagtaatatttttaggtcttatgactagctttgaggaagagggatcctagtttctatggctagcattggggaagaatgggactgagaaacaggagggcaggggaaggtcagaaaaacttttgcttctgaggccttcattttggggtattgtttactgagccccaacaccacctcgagggtttccaggtatattttttaaagaccttctaacaaatgttccttttatttatacatccatttaattattggtgctagttccaatgcaagacttaaaaaattccacttctaattccccacctgcatggagggcacaaatctccaactcatgatcagaatttcctgcaatccgtatgtcatttaatgaattccactctattcttctggaaatcgaacactctagaaacatagttttccttttagctgcaaacctattaatgctggcagccataaaataaatgcagtcacaactattccccacaaatgaatcagtcagctcagattaaaatatactctttgcatatcactgaagggctcttcctggtcagcttgtaagtgttctgttttcattgcgtggtattcattttccttttagcattgcacttgatttgtgaagtagtgttgactgctagattcccatcattaacattaagttttattgccttaaatctctgtcttatgttcactataaatgttttaagtcaacataatgctagcaagaggtgctgggttaacagactacagttggcatatgattctcatttggggcagggaattgtgcagggttattaggagctttctacctttttatttatttatttagggacagggtctcactctgttgctcaggctggagtgcagtggcacaatcatagctcactgcagcttctgacccctgggctcaagggatcctctcaactccgcctccagagtagttaggaccacaggcacatgccaccatacccacctaattttttttctttttttgagacggagttttgcttttgttgcccaggctggagtgcaatggcgtgatctcggctcactgcaacctccacctcctgggttcaagcaattctcctgcctcagcctcccgagtagctgggattacaggcatgtgccaccacgcccagctaattttgtatttttagtagagacggggtttcttcatgttggtcaggctggtctcaacctcgcaacctcaggtgatctgcctgccttggcctcccaaagtgctgcgattacaagtgtgagctgccacctggccccatatccacctaatttaaaaaaatttttttgcagagatgtgatcttgatatattgcccagcctggtctcaagctcctggcctcaagtgattctcctgtgtaggtttcccaaagcatgtggctaacattttttaatcctatacaatgttagcactggcctcatctagtcctaagaagtttgctcctaatcatgtattcattagaattgaggaggagaatatttcccatggtgaatttatatgttccgccaattcaaccaacatcaaatatttattagctgcataccgtgtgccagatacagagccagacactcaattttgcagacacagtatacctgctgtcctagagtttagactctaatgagggagagagataataaacaaggaaataagtgtatgtaacaatgtacagctagaaacgctgggaaagaaacgaacgtgagagacacttattggaatttaaatgcaagccactccactatatctactaggtgtgtgtgttacaaaatacaaaaaaagaaaagcctcctgggagggtagcaggagttaaattactcaaaattaagccacagtttaagacagcaaaacataacagaacccagagatgccccaaggcaatacaaagttaattatctaagtagtagtaacaagaataactgctggccaggcacagtggctcacgcctgtaatcccagcagtttgggaggctgaggcaggtggatcaccctgtcaaaactctcaggagttcgagaccagcctggcaaacatggtgaaaccccgtctctactaaaaatacaaaaattagccgggcatggtggcagaagcctgtaatcctagctactcgggaggctgaggcaggagaatcatttgaaccggggtggcagaggttgcagtgagctgagatggagccactgcactccagcctgggcgacagagtgagactctgtctcaaaaaaaaaaaaaaaaaaaaaaagactgctttaggatttaaggaagagtagtgtggcgggttagagatggtggttagaagaggctttctagaggatcccaaaatgatgaggagattgtggatggaaagtggtctcttaagcagaagaaaaagcatggaagaaatactagggtcagggaagataaaaaatattacgctgttatgaacaatcaattatatagggaaagtaaataatgttagaaaggtagtttaaaattttccttttttgcttatcatgttagaaagaatttaaaatagtggccaggcatggtggctcatgcctgtaatcccagcactttggggggccaaggtgggaggatcacttgagttcaggagttcaagcccagcctggccaacatggtgaaaccccgtctctactaaaaatacaaaaattagctgggcgtggtggtgcacctgtagtcccagctacttgggaggttgaggcaggagaatcgcttcaacccgggaggcagaggttgcagtgagccgagtttgtgccactgtactccagcctgggcgacagaatgagactccttcgccaaaaaaaaaaaaaaaaaaagaaagaaaaaagtaatggcagtagtagcaggagtagtagtagtaacagataaaacctatcattggcagcaacccaggcaagcatttatttctatatcttgctgatggggttgatggggttagcaattgctatagtctccctagtaggggatttaggagacagatgaaaaactgttagactatttacgtatttaaccaaaaggttccattttggggtattcatcctatggaaatagtcatgaaagtaggtaaagatttagttccagagatgtttattatagtttcttgtgaacattcttatttgaaaagaagataagtgcccaataatatcagattgattacagtacactcaagcggttagcacagatattcatcatagctgtacttgataacagttgttactattatcatgttcttgtgtgagaggtaaagggagataagattaaactttttgatgttataaacaccatcacatacttcaatctaatattttagaagaatatttaatactattttaggtttactgttgaattacatcaacagatgtttgtaaaacacagagcaaaaagtagagtaagttatacaagatcaatttagtcacatctctatgtgagtatgtttgcatcaaataaatactggaatgatatatgtgtgtgtatatatatgtatatacagtatattcaaatgtgaacagtgagtagtgagattacaggtaattttgattctttttgtttgtttgtttaacattatgttctaaaatgtgtatggtaaaaaaaaaaagtagtttttttttatttctaagactagaaaattatttagcaaacaagtggaccaaagatattacagatagcatttcctaaacatgatgtgccttttgtcatggaaaaaatggatgattttgttttcttcttcagcttaatatgcgatataataagctcagtcatcgaagagtgaagtgcagcatactgaaaaagtatgatttggtttcacacagatcttggtttaaatcccagcttcatctctcattaatgatcacatcctgaacaagttaatatgtatgtctcggtcttctctttagaaagctgacaatggggacatgtatgttaagtgactagcacagcgcttaccagaggaccattctcccgctgtagcaggacgagccgcagacgaaacctctcagacaccaaattgtaaaaggaagggctttattcagctgggagtatgggccagctactctctcaaaatccgagctctctgagtgcacaatttctgtcccttttaatggctcacaacactaaagatttcacgtgaaagggtggtgattgatttgagcaagcaggcggtacgtgacaggggctgcatgcaccggtggtcagagagaaacagaacagggcagggagtttcaaaatgttcttctatacaatgtctggaatctatgagtaacatcggtttctaagttatgagttgatttttagctactgggtttaggccaggcaggcccaggcctggtttcgggcctggcgccgggctgcctgtctttgattttacttccttgttgttttttcttaaaacaggtactgagtataaaacaatataaaacaatatgagagggtctctctcttccctcaccacatatgtgagaaaagagaaaatatggctaagtcatgtacttaactgagtattaaaacacatgtcttaccagaaatagcaatttttcaagtgtgtgaaacacattaaaaataaactttgaaactccaaaaatctttaaaatatgtaaattcatttagactttactagaaaaataaagttatctctctgaaattttgttgttaaatatttgtagaaaaggatgtaaagtggaatgaggtctagagagagaattttgatggatgtgtgtatttgagtcagttttcatcccactgaatctttagtcaaatcaaataaaaatgaaggtaatttgtcagcttgcagaatcatgccaagcaaagtcgaaaactgccagcctatgttcattctcatggtttgaacaaaccgaactccaagtaattcattgtttggttttgaattacttatattcactctgttgatcccattttgctttgaaattgtactttcatgtttattttctgtagtccagaatggaggtaggaggaggaaatatctggaaatacctaaaaacatcttgaacataccttaaaagtaacatgtttaggaggtccctgagttagttttattagcacctctgagtgttacagaaatgattgcaaatctccaaactcacagacatttgcccagagtccccacctataatcatgtgctgggagagctttagtataattattaggccagtgtaggacaagcagcagcgtgcacatagtcacatttaaagtgaggatttaaatgacaacaaaaagcaaagcaaaatgacactctatataacttgggattgtttttatttaaatcaaaatttaaaaaattttaattatacatatgtcctggggtatgagtggaggggtggctatggggatgggtacacaggcatgaatgaacacaggagactatgaaagatgcttcagatgccccccggacaaagatggagaaggaaatgttttctgtaccatctctatatgggcagttcagctttctctctgtgcttgttttctctgctctctctgtttggatttgaagaaaaagaggttttttgttttttttttttcctttttcttttgtctctatcttatttattttttaagtagactgtcaaaattttagctgtgattgaagaaaagaaataagacaaataaaattagtgggaaaccaaggagggggaaatgggattgccacttcctcttgtacagagtcagcagttttaatacctgtaaacaaaaagttctttgctggaactctttttagaatggaaaatgggatgaataggtacagcattatcaaaccatttgttgtgctccctttttcttgaattgatggaaaatatagaaataacacaaaccaaagttgacactcttgaaatgacttgtccttagaatttattgtttatctcacggaaacatgaagaaatgtcttcattaatgtttttgatctcagagccccatttccttttatctcccagcagaagtgttgcagtgtcctcacatttggattgagaatttagatagataagaattcaaccctctagtcccatttactgcaattgtatttaaataccagcttaattagctgtactcatcctccttcccaatcctctttgaagtaggaaagtcccattgcttccgtttagctaatgctatgctcataccctagtttttaagctttgtagaaagtacagatatgactgccccatgtgatctctaagaagtctagatatttgatccacagaagcattttgttccatggaggacgtggagtttgttgctttggatttgagcttcatttaaagcatttgcttatttttcatcttgcaaaattaatctaaatcaacttaatgaagggtagaacattgagatatatacctgttaatagtagaataatatgacatggcacagtatccaggtatggaaaaggtgaatagggatagtgttatgagatttttagagtacgttaattttataaagcatgcttatgggaaaagccaaacattgatgacatttcgcagaaaatgttatgttcaggtttggcaaataccaataaggtcagagaaaaagcaatatgaatcagtattaagaaaattataagatagtgtatgtctaggtcatgatctttagtatcatcaataaaaccactaaggatgcctcactatagctgtgagatgggttcggaccatgatatccagtttaatactatttgggagcagaagtaactagatatatttatcctatgatattttacacttattggacacctgttgaatctctgttggcttgagatttaatttgctaagagaaaagcaactgaagttactaaggtaatagacataacatatgatctaaaaattgagagtacgttaatcaaggggagtgagcagaaattattctcgtcaatcatccatgtgtccctctatatccttcacctttattgctgttagatttggaggaaattctgagcaatgttccgtgatcaggggtgaaaagtgtcatttctgggctgaggcagtttatagtcatttgcaccttttctataccactctctttccctgccttctcttctcaatgttctgaaaatcttgtgttctaaagggacttgaataagatggagatagagtgccaacccacattagcatttatagcatatatggagcaagaaatgaacacgtgtgtatgtctttatgtaagttacagatacttatctatgatacctatcctgactattgcaacatgttaagctttccactgataattaaatttcatatataaatagataattaattttgatatttaaaaaatgtaagttacaaaagcactatgctactctgagaggaaattgagaaatactaaagttttctttcatggagccccatagttggaccttcacaaaggcttcaaaagctagtttcctaaccagtaaaagtcagcatgagacacagtgggctgagataacaggcccctcagcctaggggtggtttgctgaagtaggaggccagagcctctggatgagtcatcttcagttgttacgacggcttactctgtggaccatgcaaataatatcattttcgatgtgttccatgatgcgaaaaagttagagaagtaccataggtctttgtatcaggcaccaatataaccacccctacactccagatcttctttccccatactcatttctccactctcctccaagtcctgcctcaaacgagttattattttcacataaaactgagaaggaactgttgaaatgactgacatcttcagcaaataaaatagttgtcaaattaataaataaatgtcacttgaggcacttctgagcttctcaatatgtcttcttttggaggactatttgttggcataggagaagatttcctagcaaccctcaaaatctttccaattaggaacctaaattctattcccaaaggttatgatataaagaggaaacttgaaaatttgtaactgaactctattgaagtatggggtatttcaattgagtaagcccaatatttacctgcatcacaaaaaaactagattttaataatttcttatcaagtgtttatgccatgtaccatatttaacatatatttactcattagtttttcaaaattcttatgaaatgatattgtttttatacccattttacagatgagaaaactgagagagaccttaaggagctttctcatgatgcatggctagttaatggcagaactcatgttaaagcaagcagtccaaccctgcctgggctcttaaacagtggagtctgctgtctccttttaataggatgaaggtgaagttctcagcttgatatttttgtttcattcagtgcaaagtgtcatcttctaccccagtgccaaaaattacttcaaagaaaacagctttttgactaccgacagttatgtacaagaggtgtgatttggggttttaagagcttactttgacacagctcagatcccttttttggtagtgaaaattatgctgttatctcctaaaaaacatcatctgctctgtccccacctctttaatttgacaggtgattccatatccatgtaagagcattttggtgtctgaaaaacaataaaaatcgtcccagtaaacccatgttctattcaaaaaattttggcatattgattgtctggggtaaggttcaaaattgcataaacttccttgccccacaaatcactttgttgcatcgacaataataatcacaattattgatagtaaaataatttggccattctatgaatagtaaggactgcacatgttaaaaagaggcaaaagaatggatagatgatcagaatccattctcagtaaccagagctaaggaaacagctcaagtaaaaacgctcagcttacttaatgctctatagtaattaatagtaattgataacaacttgtagcaattaagatctaatgcacttaatttgcaaatgtactccttaactttgaatacacttttttctctaaggcgaaagtctagaattggagactcttggattcttcttcccattcttttccttcttccttggaaaaaatcagaaacaatctcgaaatgtggcctgttggagctggaaaagagcttagagattgttctagtacagttgtgtcaaactacaggtgaaaactttgaatcttggagaagaccactggtttattccacctctctagccatcggcatgaatgtctattggtatacttggtttagctgcccaatttatggccaagactgggacatgatatggtacaaaatatggtgtttttgtataaagagctatctcttgttccttcgttgtaaggggactgagggcacaagagttctaagactgataatcccatcaacttaatatattaaaagaggttttatatctaaagcatccaacacagtgtctggcctagaggaggcactatatctatagaacaaataaacgaatgttcgaacatagcctctctaaattctatttgaatgacttaacacaaagatcagaaatttgcatagctgtttgtgttagccctttaaaacaaaactctcctaggggaacatatgtgaattctattcagagtttaaaaacagattcatgggagagccccaaaccaatcaaaaacatggcaaggtttaaaaaacaaaaaagacaaaaaacaaaccagaaaaaaaaaattatgaaaagaccctgcctgccaagagtgacttgtttgcaattgaaaacctggagatatgagtacataatagaaacgtggcaatgatcatctgggcaaaaacacaatttgtatgacaatgaatcaggaaatgtcctggaacaccagaagatgaaaaacctgggattttataaggcacattcaagttgctgcgcatgcgtcacaccatgaattttcctgtggtctgacatcctgttaaaagcattggtctctttctaaacattggtagtagaagtgtaccacaacaggcaaccttacatttaaagaaagaatgtaatagatacctgtggaaactgtcaaaagtgtcttctagagctatttttgaggtctcttttattccttcattcctgatctgaaattcattaaggctaagagtgccccttaaattacgttctgctgtatcctggaggaacacctgaagaagttaataataaaccctagagattaggcaagtggaaagaattatgaaataaaacaaagcaaagaaattgtgtaaacaaattaattaattgtctgaaagtgaaagcatgtttgtaattttgcccttgtcaaagaaaaattggagttcattatgctcgctgactgatttaaaagcttcttcccgcgtagcatcaccgggagaatgagtgtgttgtgagtgcaaagcatggatcggttgcagcatcaattaaaatagaaattcattattgaaacctccagagtaaaaggtttgtgctttctgctttgaggatgggaggaagcttttcttttcttatttttaagttttgtttattttttttctctcctctctccaattggtataggaacatttattttggatttccagtagcaggcattctacctttttgtaataaattatattaatacctgttatacattgagcacatgctatataccaggcattctatatactttatcatctttaaccctcagagcaatcatgtggtgaaaggtatccatcagtatcacttgaggaaactgaagctcacggaggtaaaattgaacagctactaagtgatgatgccaaggatttaacacaccctaggtttgtctgactaggaacttctggtctctccaggacacaacagagccttctaaggcaggtttactgtgttgagttgggtttgcccctataacaaggctatcaaagatatatgtgtgtatccaggataggcattctgtattcagttacgtgttggagtgctatcgagagcccagtgggattataggtggaataagataccttcaacacagccatctgctgcatatggtgacccttgtgctctccaaatgagcagaagctcaaccagctttgctgaaatgtgtttgatgagaggatggtgtgttttacttttgtgacatctttccccagaggtggttgcctgaagagttgaactttagagaacaaaaagaaagaaatgtaggatccatttatggtctctcctagaatcatgccatatgttggactctatatggaaagggaggaggaataaaatgaagaaagaggagtacacagagcatggaaaaccataagtacgtgtgatccatgattacatcattgcaccttgcaaaaacttgttgattttagctctggggaggatgagtgaaaatcatggagtcagagcagaatcatgaaaagagattggttttggagccaagggaactcagatttacatctggtcacaacattttttttttaatattccctttttttattaattattttttttttaatttaagttccaggatacatgtgcaggatgtgaaggtttatttcgtaggtaaatgcattccatggtggtttgcagtacctatcaacccatcacctaagtattaagccctgcatgcattaactatttatcctgatgctctctctccttctactccccagcaggccccagtgagttttgttcccctctctgtgtccatgtgttctcattgttcagctcccacttataagtgagaatatgcagtgtttggttttctattcctgcattagtttgctgaggataatggcttccagctccctccatgtccctgaaaaggacatgatcttattgcttttaatggctgcatagtattccatggtatctatataccacattgtctttgtccagtctatcattgatgggcatttaggttgattctgtgtctttgctgttgtgaatagtgctccaatgaacatatgtgtgcatgtatccttataacagaatgatttatgttcctttgggtatacatcttgtaataggattgctgggtctaatggtatttctggttctagatctttgaggaattgccacactgttttccataatgtttgaactaatttacattcccaccaacagtgtaaaagcattcctacttctccacagcctcactagcatctgttgtttcttgactttttaataatcaccattctgactgtcatgagatggagtctcattgtggttttgattttcatttctctaatgatcagtgatgttgttgagctttttttcatgtttgtcggctgcataaatgttttcttttgagaagtgtctgttcgtgtcctttgcccacttttttttttattatactttaagctttagggtacatgtgcccaacgtgcaggttagttacatatgtatacatgtgccatgttggtgtgctgcacccattaacttgtcatttaacattaggtatatctcctaatgctatccctccccctccctgcaccccacaacaggccccggtgtgtgatgttccccttcctgtgcccatgtgttctcattgttcaattcccacctatgagtgacaacatgcagtgtttggtttttttgtccttgcaatagtttgctgagaatgatggtttccagcttcatccatgtccctacaaaggacatgaactcatcattttctatggctgcatagtattccatggtgtatatgtgccacattttcttaatccagtctatcattgttggacatttgggttggttccaagtctttgctattgtgaatagtgccgcaataaacatatgtgtgcatgtgtctttatagcaccatgatttataatcctttgggtatatacccactaatgggattgctgggtcaaatggtatttctagttcaagatccctgaggaatcgccacactgacttccacaatggttgaactagtttacagtcccaccaacagtgtcaaagtgttcctatttctccacatcctctccagcacctgttgtttcctaactttttaatgattaccattctaactggtatgagatggtgtctcattgtggttttgatttgcatttctctgatggccggtgatgatgagcattttttcatgtgtctttcagctgcataaatgtcttcttttgagaagtgtctgttcatatcctttgcccactttttgatggggttgtttgtttttttcttgtaaatttgtttgagttcattgtagattctggatattagccctttgtcagatgagtagattacagaaattttctcccattttgtaggttgcttgttcactctgatggtagtttcttttgctgtgcagaagctctttagtttaattagatcccatttgttagttttggcttttgttgccattgctttttgtgttttagacatgaagtccttgcccatgcctatgtcctgaatggtattgcctaggttttcttctagggtttttatggtttcaggtctaacatttaagtctttaatccatcttgaatatcttgaattaatttttgtataaggtgtaaggaagggatccagtttcagctttctacatatggctagccagttttcccagcaccatttattaaatagggaatcgtttccccacttcttaatggggtggtttgtttttttcttgtgaatttgtttacgttccttgtagattctggatattagacctctgtcagatggatagtttgcaacatttttctcccattctctaggttgcctgttcactgtgatgatagtttagtttgccaatcgcagccacttttaacactgttactctgggtaggttatttggtctgagtgtcagtccctccttctgtaaaatggggggaattcctgaaggacagtgttaggatgaaatcacattacttataatgtcgaattcctctgtcaatgcttatatgcttctcattcattatttctaagtcaagcatttttaaagcatttaacatgcaattattcatttttgtttataaagtgaccctgtgaacttatccctattttacagttgatgaatctgagacactgagagattaaataacctacctaagatcatccagctataaagtgatcgagacaggttttgtttgttggttggttggttttgagatggagtcttgctctgtcacccagcctggagtgcagtggcacgatcttggctcactgcaacctccacctcccagtaatggtgcaattacaggcatgcaccaccacacctggctaattttttttttgtatttttagcagagactgggtttcaccacgttggccaggttggtcttgaactcctgacctcaaatcatccacccacctgggcctcccaaagtgctgggactacaggtgccccgctcaagacagattttaaacctagcattcttgctccagaattcatgctgttaatcactgctattctgcctctctgttgactctcagaacctctcttggtcaaagcaagaaggtatcgaacagacttcctgtgctgttttataagctgcctcaaatccttccaggacagggcaatgtctatataaatagatgttataaaaagtataatctaggccctatttatttttctctcagattcatgtctaattcataccagttgagccttgctatttgagtttcacttaaaagcattctgacatagctcacctcccctctttctcttatattgctacccataaggactagagaaaagatggataacataatcctgagtctatgagttgctagaaattcctcattataattgtgtgtcttctggcaaaaataaataaataactttctcttttaaagccacttataggagacaatgcacattctgtgttttttctctgtggctgtgcatggacacagactcttctgcccttctcttgcctgttccttgattcctcatgtttctgtctggtgcctacctgagatccaggtattcctctttacctcgtcgtcttgctattttttctagggacttttcttctcccaaagttatgttgaaacaggcaaaacacctagaaatgggtcatgtgggtgagtagaggggagtgagaaggagagggaaaaaattcccaaagctcatattaggcaattacagttctaatgaatagaagcagtctattcaggcttctggcaatattttatgctcacctagtgtagtctgtattcccttaaatgggtaaaagatgccttaaaaagattgctttgaaggatgaagagacttgaaacaactctctgaacaaaagaacttgtttattcattcatttattcagcttgcatttattatgtgctgggtattatgcatataaatattttcttaagttttgtttttaattaacacataatagtatatatttatggggcacagtgagatgtttgatacatgtagacattatgtaaaaatcaaaccagtgtgtttagcgtattcatcacctcatatatttacctttttcttctggtgagagcattcaaaatcttctcttctagctattttgaaatacaacaatacaatatttttatccctagtcaccctgctgtgcagtagaacaccggagcttattccctccatttaactgtaactttgtacctgttgaccaatcatggtccctattctaaaagtgtcacagcctaggtaggttgacaaacaggtaaatcaggattacaatacaaaagtaaaatagcctggatcaaggaaagcacaggttgttatggaaacacaagagaggacatgtaaataagattgagggaggttcaagaaggcttttcaggagagatgacttttgaactgagttttaaagaccactgggtagacaataggagaaaaaaacatttctggctaagaggttagtgtggatgagcaagtggctctgtatagctggaggagtgtctgaattttccaacatgaaaaggaccacaaacttggtggaatcaaacaaagattttttttttcttttgtcacagttctggaggttggaagtccaaaatcaaggtgtcagcaaggctggttccttctggaggttctgaaaatgaatcccttccatgcctctctcccagcttctggtgctggtggatgcatcactctgatctctggctgtctttacattgccttctctgtgtttctccttttctgcctgtatcttctcttcttctaaagacacttgccaggccaggagcggtggctcaaacctgtaatcccagcactttgggaggccaaggcaggcagaccacctgagtttgagaccagcctggccactgtggtgaaaccctgtctctactaaaaatacaaaaattagccgggtgtggtggcgcatgcctgtaatcccaacgattcaggaggccatggcaaaagaatcgcttgaaacccaggaggcggaggttgcagtgagccaagattgtgccattgcactccagcctgggcaacaagagcgaaactcatctcaaaaaaaaagatacttgccattggattcagagcccacctagataatccaggatgatctcatctagacagcctttactaattccatcttgcaaagactcttttttcaaataatgacacattcatacattccatatcttttggggagacactatttaacccactacaaggtataaagatgagctataggcctgatgaggtaggaaagaggcagggcaaggtctcccagacactcatgtacctgacaaggtgagtctcaagagacacaagaaaaccttggaactgtaattgtgaaattgacatctatctctggaaaatgactattactcctaatgcctctagccaaagactatcagaaacccacctgtagctgatggagttgcatttgttactcattgtttcgatgaggacacacatcatgaggaaccatcatgtctcagctagagggtgttggagaaaacctattgtaggaatttgactttggttgggtaatatgaggaagcgtccaagaaagcctagttcactttagattagatgctgtcagaaagcagaggcaattctaaaaatgtgtatcttgattaaatcttctctgtatggaacaagagtgaggataaagttgtaaatgataaagaagtagcaatcactagccaagagaggggactgtttgctattttgtgggtgaagcagtgactttgtttttctgtgcattgattaaattaagatgtagctttgttttgactcagtttatcatggtctcagagtgacttcttctgagattggtattctgtgacattgctcatgtgcaatagaagaataacaagatctagccatgagtgccaggttacgttccagatgtcacaggctgctcttttgttttgtttttctttttcaataccaagtgataagaatgagcatgcctaaaattccagcagttgtaataaaatacatcaaccaaaaggttcagactgtcctgtaagacccataataagagtctcaatgtgttcttaaaagaacattctttcttagcctacgtgaacatccttctctagacttaaattacttctgacccacatgttgggccgtatctattttaaagacaagaggagctaactgcaaagttccttgtctggtaagctgtttcatctgatagttgtaatagcattttctcccgtctcactgtagggcctaaccccacaagcatccttgtgaagaaagaccccacagtcctctttttaagctttctccctccctttcctggggtgccttatctatttaaatattagaggtgagtcaaatgtaattctctttaatgaaaaacaaacaagtgatagaaccctaaacgctcttttggcaaagatcccttcagaacaaacaatcttcttttaaaagaagtcagagctaggaaagggccacaggagagcagggatagccaactaaactatgcagcaggcttctctgaaaaaaagtgagtgacttttttggtgtggcaagaaaaaaaaaaagtaaagtttgatataactagtagtccttggaatgacaagtgacaagagaggtctcttccctccctatagtcccaaggagaaaagggctctgtaaaattaaaggcacaggtattcagttgaaaggacatatttttctcctctaacttataattagcctgcgatactggcttctgtaggctcttatgaaggcaaattgctcaggacagtgactctggcgatgtcagtcatacaggcaagcactgggatatctatcacaaacacatgccagttgtcatcttccaaggcatcacctgattgccaactcaggtcaggaagaaatcattcctctttcttcttctgtgatgttacttatctgttgcaacagaggagagggttagcacctttcatgacatattccagcatcctgttaaattgatcagaagaccaattgcacacagtgtcttctaccattgagattggaaacacagccaagggtggagatggtcagtgaggcttcccagtgtcttgcaagttccaggtcagttgtttatgcttagagtcccctgacagagagatggatgtgttagcaggttctagggcctgtggtttcccttgtggaaatgccagtggaccatgtgtgctccttgggtatcagggtgattgggcttgggttggttgtggccacagcatgaactggagagtcggctgtatttggcatgacaaggttggcacaggccagctgagaccttgaaaaatttggagctgatgcagaggtgaataaacacattgaaaacagaagctgcaacctcaaatttctacagggaccagacaggtaatatgcctgagtgaagcaggccaggtggcaaattgtacagtgcaggccccaatcaaagtgcacagtggccactcagctgccactggattataattgtgtagagatgtgagtttagagttgtcagcttttcaagagaagccaacagtctggtgtgtatgttaaatcccctgattctggcatctaattaatgcccttagcagtccaaaccaaacaatgtgtgagctgccatttttgcaaccttgagctaatggtgttaacgtccagtttctttgtttcataacatctatggaatggctttgtgaatgcaaatgttgaaacattgtgagtctcatccccaacagtgaaaataaatacaaaatttaggcaaaaaataaaaataaaaataaaaatacttcttaaatgtcacagcgcccccatggggctggctggggcaacaaattaagggacacagctgagctttcgattctgtcagtaactaagtagtaatggtgcctcagggggtctgagtcattgaacaagcgctacaggatagcacaatactaggtacacaaagtaggcgagcacaggctccctacctttgaaaagtttataagttcattaacagtattatgtttccatgcactggagcattagaggaaaaatgccacgataacatctaaacaagagtgcagtgggccctgagaagtatgatgattctgtttccttctttaaagcatctcttcttaataatgtgcagtagtagagagaatagaaaagcagcatgatggccatgtgacttgctggatggatgccatttctgttggatgagattggacatcaataggtaaaaccaataagaggttgtgtgcattttcagattctggaattctggaatctatgacatttttggaaaaatagctctcctaagacactggttctaaatatagcagtgggtttcaatagttctatgaattgaaatcaatagtactaaggagcgaagagcctagatcactctcccaagaatcattgcttagatgagtggttctcaaagtgtagtctctggccaccagcatcacctggcaacttgttacaaacgcatattgttgattctcattccacaactattgaatcagaaattctgggactgagtcctagcaatctgtgttttaaacaagccctccaagtgatttaatgcatgccaaatactaagaatcactgttatccttggaagaggggaaagctcagataacccacaattgaggtctagagatgttcatagtctcttctacaagtaagtcttaccagtgagctatagtagagataaccaagatagcatgtagctggaggagctgttgcttatttgactggattttttggtcattttttctttctcacttatgtgtttgttctccacttgttttcaagccccattgatttctgtattagctttctattgctgctatgataaattaccacacattttcatggcttaaagcaacacaaatttatgagagttctgaaggttagaagtccaatacaggtatctctggataaaatcaaggtgtcagaattagagcaaatcccttcttggggcctctcgggaacaatctacttccttgctttttccagcttctaaaggccacctgctttctttggctcatgggcccttttcttataaatgcagatgttgtttttaaaaatgaacaatgttaggctgccttcctcgaggggctgtctctcttgttctcactcttctgcctccccttccacctttaagtatcctgtgattacattgggtgcacctggatgataggcaagctccctattttaagatcaactgattagcaaatttattcccctgtgctatagaaggtaccatattcacatgcttcaagaattagaatatattgtatctttcatgggggaggtacattattctgcctaccataagagattgtattcggagggcttgtttttttttttgttgttgttgttttttcaccaggaaatggagcctggtgaaaaatgtaatatatagcctcttcctccacactactaaactacctttctgtgtcctacagagactgtgtaatattcactggtgaagacataagctttgtagtcacaaacctgagttgacgttcctactctggcacttactagattgatatggtttggctgtgtccccacccaaatctcatcttgaattcccatgtgttgtgggagggacccggtgggaggtaattgaatcatgggggtaggtatttcccagggtgttctcctgatagtgagtaagtctcatgaggtctgatggttattataagggggagcttctctgcacaagctctctttgcctgctgccatttcacgtaaggtgtgacttgctcctccttgccttctgccatgattgtgaggcctccccagccacatggaactgtaagtccaattaaacctctttcttttgtaaattgcccagtcttggatatgtctttatcagcaccatgaaaatggactaatatatagatgtaataactttttgcaagttatgcaattttgggccatagattcctttattctgaagtggagaaaatactttccttatacaattgttatgtttacataaaataaggtgccagatacatagtagaaataaaataaatgatgttactacttcctaaaatcctaaaagtttcatttcagattgctgagtaaacccagttaaagaaaccagcctctgtgttttggtgttgtcattaatgctaagttacatttccttagggtatctgcattaagcaaatgtaagatgtttgagtttcaaagatgaacaagtgacttgtaagtgtaaagtggtatggctgtttttaataaataggtaataccacccttttggcgggtagtagagaaaagaagatgagtttttagaaaaagactcagagttactcagaattaagaaaatgaatccttactgtcaatatgagtctcccaactgctagcgcaagtggtggatagattttcttttccactagatttacttcctgatatacacatttatcactcaagcatggactgttcatcaagtcattttccatctataaccccagctgaagcctgacaggttgtgtgtttattatgtactcttaaaaaactggagctcatttgcccctgctgcggggagagcagactcagacagatagagggataaggtcattcagtggaatgcccattcactgcagtcaagcctaaataatagagaggtgtaaaacaaccaggaaaagctctgattattgccagaaatcaaatattgatcagatagtcccctaacttaccaacttccctcttaatgatctgattcccatgtattcattcatcagttagttgagcccctcctatagaccaagccctgtgcatggctataaaaaacagtatgtccatgcccacttccccctctacactcaatctggagccatgagaaattaaataacctttaatttctgaagatcgggtgctcttataaaacatcagtacttataattgtatcctgcagtggaaaattgtgcaataatctttttctgaaggcatggccatgaattgtactatattactccatctatcttcttttaacactaaacaaaatgaagagaatacattgtgcatggcccctagaaatttaccttcaaatagaaacaaagctgctaactccacacacacatgatatgctgaaaactgaataaatattgaagaatctaaattcaattaattagcaagccaaatcttgcctcaaattatgttgacattatttattcctttgttgattaaatgagttgcctcttaagccaaaagagaagatcttaagctcttgtttcttcattccaggtctcttctctccaaggaatttgggaaggagcaagcacagcagaggccagttttactgcatgctggtgctcagagggaatagggttcatagagtagaagacagtgaggagagaaccagtaaggaggttggggagctggatagcatttacagcatgggttcattgattcattgggaggcttataaatttcctatgcatagaagcacctgtttttaaacagagacatgtattcaacacatgccttcgagaactaattggaaagagtctttgatggcctatcgttttgaatttgcatgaccagaactccactatccatgcaaacacagtggacttgctgcaattgtcctttgacttaggcaactttaacaatgcaggggaggaggggtgagaagaggctaggagaggaagtgtcagtgggagaagccaagaataattgaagtagtgtgttatttcttttttttttaactattaattttttttattattatactttaagttctgggatacatgtgcagaaggtgcaggtttgttacataggtatacatatgccatggtggtttgctgcactcatcaacccatcatctacattaggtatttctcctaatactatccctcccctagccctccacccacctgacaggtctcagtgtgtgatgttcccctccttgtgtccacgtattctcgttgttcaactcccacttatgagtgagaacatgcagtgtttggttttctgttcctgtgttagtttgctgagaatgatggtttccagcttcaccagtgtccctgcaaaggacatgaagtcattcttttttatggctgcataatattccatggtgtatatgtgccacattttctttatccagtctatcattgatagacatttgggtttgttccaagtctttgctattgtgaacagtgctacaataaacatacatgtgcatgtgtctttatagtagaatgatttataatcctttgggtatataccctgcaatcccattactaggtagtatggcatttctaaccaccctttccttccatgagcttaggcctgggagttgcagtgagtgggagccttaaatctaccaagccgcaaatttctgtgttcctgaggcctctcaaggcatcaacatcttgaatagaaaataagtctatccttaaagatacagtacatttaaagattaaaaaaaaaaaaaacaaaaaaaatcatgttccctaaacacaaataacttcatctgctgcccaagcaaagaaacaaagagatgtctactaaaggcaaaaatgccaatgtcgtgcttcctgagcacagacattgcactgcacagaatggaccattttggagactttcaaagacagttttgactcagtaatctcctatgctgactttattacctaactgtgtcctgtggaggattaggtgatagtggcaggttaggtccatgggagattggattccactgtgatcagcaaacagaataaccagcatgtgtgaagtgacttttgtcagaggagtgatgaggagtgctctctgaattcagtgttttccctctttaatttttgctaatcatgggtcatttatctgtgagctactgcattgtttccactgcctgctttccaaccagggataggttttatctcaaaaaacagaagacaaaacctcttaacctaaaactaagactccctctgggagattccaaagagagacggctttgatgtaatgggaagggagctgatttagggtctaataaagtcttctaccagctgtgtgatctttggcagtttctagttccctaggtactatttgcctatctatagaaatggggttaacagcacctactgctgaagttggtatggacataatgagataccatacatgtaaggaaatgaaaagtattccacaaatactccttccctgagcttgttccttcctttcaccaaaacacacatattccatctttcaactctcctgctctacacgtgtatgcttgagtttagggccctggaataagcaatcctgggtcaacatctgctctgcaaacatcaaaaagtgtgagcaggggcagcctagccttggtattgatgtgtttcccatccacagccacattcaccattagacccagtattagtcactgggtccccggggccagcatttactgttgccttcaaaaatgcagactcattactaacaaaagtggtatgtccattattatgacctatttagtggcccagcaaatccccaaattctattgagccacatctgtctaccgaggggctctgcggttgattgtctgagacggatctgcttgcaaagaggctgatttgggaaagttcaacagccccacttagttgctctgtgacatcctgacttcctacaggttacttctcatattgttgggtgtttgtttgtttgttagtttgtttgtttgacagaggtctcactctgtcaccaggctggagtgcagtggcatgatctcggctcactgcaacctcctcctcccaggttcaagggattctcctgcctcagcctcccgaatagctgggactacatgcacaccccaccacaccaagctaatttttttattttttagtagagacgaggtttcaccatattggccaggatggtcttgatctcttgacctcatgatccacccgcctcagccttccaaagtgctgggattacaggcatgagccaccatgcctggcctcaatgttgtgttttaaagttcagctggaagatacccttattcctaagaaatccactaaagaaaactgttcttccaggagttccatttcattctctgggaagggtccatcccttgttcctgttccctttcctctgaattctataggacatatcacagcaccttcttgctgcctccttgtttgtgtctttcattaaactgtaagctccacacatgcagggactgtatttattttttcagagatgtgtcttcaacactgaatgcaacagtgacacttgacaaatatttttcaaacacattgaaatgagtttgatcaccacctgggcattcacagtagtccagaggtcccctgcactgtgagtgtgactaaagctcaggaaagtcagaaaggccagccaaggaaggaagatgctggcaagactcggaaagtgcaggagtgtatgagattgaatcacctggacaggggcacccaaacaaaggcgtctgctggctacgtgactttggttaagttgctgaacttctttgtccacagtttcctcaacactaaaacaaggagtaatcattatatctactttatagggctgttctggggattaaattagttaatatttataaagcatttaaaattatacatggtatgaaatgagcacaaataagtgggatgagggagacataaacaaaagttcctaaagtggaggttaattcagagccaaagacattgcctgggcattagaagtagtcagacatgaatttgagtcccagctaaggcatttatcaactgggtcggccttgaagaagccgcttgcattctgagtcttgctttccatagctatgaaatgttctcaatcacagttatctcccaggattgttaagagaagtttcctttaaatgttcagaatagtgaatggcatttcttatgtgcctaataaatattaactcatctactgccatcccttcctttctttccctctcattctttctcttttcctggcccataactttctgctcagaactggaaacatctttgaaggagggagaaggagcatgagagtcaggggcttgtttacaaaacaaaacatggaaatagtaaaaacaacaaatctaatagtctctgaaatgattttgtctcccactaggaccagaaaaagcagcagaattttatgttaatggattcggtggaaaatacggctttaatgaaacattgactatgattactctgttgtcatttctctgaatttctggtcctctttccatctctcttttaagaagatctgaatggttatttctcaacacaccaggattatgttttcttcgtcaagagtttgaggaacctagggtgcagcttgagctgctgagctgtctgtctttattctgacaggcgtggactccagtgtttagctcaagccccagggactggcttttgaacagcagctgttctcagtgaaactgaaatgcgcagaggggaggggaatagtacaccctgggaagtacagggagcaggtaagttgttttgctaatacatccctggggaagtttctagtgtttctgggcatggctgagcgcacagctcataaaaaatgcaccagatcattgttggcatttgatgtcagaagaagctacagtaccaagagacatggactgtctggtttcctgtgacatccaggtgacacaccaggtttccactgcttttcgtcattagcccagatgttcccagttacttggacagagagccttgtagatccctgtatatggagtcttccttcccgtggttcattagaaatggcaaagccaaactggcagtattcttcaatttgttgataagagtgcttcagtgcatgtatttacaaatacacattgttgttttcaatttgtttattcagtgaatcaaaatagcaaaacacattaactataagacaagagaaggataaggaagtaacatctattgggtacctgctatgttccaggcaatgacagagctgcttgacagaaaatgtttaatgtcttcctcattgtagctacatgtggtgtttcaggtatgattactgcatgttacagtgggaagtagcccagcattcttgaaagagtatagggtcctcactatctgtgtgaatttgagtagttacttaaaccctctgagctttattttatttctgtaaaggaatttaacaaagtggctaatagggtgtgtagggatgaagggacttttaagtttgctgaaataaactggaaatagattagcaggagagaaggcgtacaaatttattaacatgcagatgtgcacaggatccacacaaaatgggaagactcaaagaaaggccagatagttgaaggttaaatacccttttcataggggagagggaaatgggggacattgccaattttagagaaagagtaaataatttttagaggagatgagtggcctggaagaacagatgatagcctgggacaaagttcctctgcactatggggcaggtgatgacaagctataggaaagtgagggacagaactgcgcttcaaacaaaggttgttttattatacagataaagtctctaaggtaatggcccttagaagaataatgggaagaacaggtgaaaactctgtctgggtgtgttgtgggtgccctggaggtagagacttcttcttatctctcctgcatcagagttaatcttctctggttagtgtagatttcagggagcggtcaaagaccattgcattccttctggataaactttcttctggtgagagaacttcagagagagcccctccctacacttaggaaaggaatgtggggggtggggaaagctgtgcaggagaaagtcagagaaagaccttggttctgaggcctttcaaccttctttgttcaaagcaatcagtatgccaaagtaccatattttggggtatcattttctgagcctcaacaattgtcatgaagattgagtatgattgtaatataaagggctaacatttttacttgacctacatgagctgatcagtactgagagctcctcttacaagaaatggaccagagagggagggaaggggaaggggaggaaagggaagggaagggacaaaaagaaagaaaataaagaattgaggttcaggaaggttgaataatttaattcgcccaaaggcttacagctgctaggacgttcagccaaaaattacacccaggtctgatttcaaagacactaaaaccactgtttacttatagctacttagtgcaccccatctcatcccacccaatgccacctaactcccacctctattgtgagataactacatgcacgcactcatttggtaagtgggatcctggtgcctatttgactgacatttgagagttagcacatacaggtggcacaggtggtatctgcacagaaggaggaaggtggtgctgacacctctggatcttacacttgggtttagaacatagctggtcactaaagccacagggtagtggcagaacatttggatacatctttaaagactcaattagtatcccctcactgagtccccatcttattcattggttagccccctagactgaactgtcaaaaatgttctaagtctccttgtgttctctttatctttgtttttacaatcacaacacaataacaggagatactttttaatgaatgggcaggaactctccactgagatgtaaacatgttatactgggaattctgctgcagggttaatttatgatgatggagtcatctatatcatagctgaaagcaaggctttggggaagtgaaacccaggaaaggtcagttgtaatgcgcattgtctatattttaatgtaaaataccaattttgttgggaaaagggtggtcgggaaagaggtttgatccaaaaggttggaagttggggaaataattcaaaaagaaaactccaaataaacaacagagttggctggtcagttagccaaaggacaccggaggattcctgaaggtctgcatgtggtgagcacaaacttggtagggaaaaggcaggaatctgggtggggagaaggtactagaattcacaaggaagactcgtaaaatggaaactacggttgctgaaacacgttgtctactctattaattttctgccaaacatttcatgtgcttttagttcttcattgagcatgacatacttcaaatactcaaacctatttccttcttgtaggaatagctaggcatttcctcccacggtccaaggtgagactgaagataagtagaatctccacacttatttgtttactttggtccagactatagagtcaggttaaaagccatctggggaaatagccagtagccaatgcttattagcgtactacttgggtaggtgggaggatgcaagagctgtcaaacagcagccatcctgatgagaaagtgaagaaagccagaagcagcgtctcttctgtggcagtcacacagggtcccttgatactcagcccccaacatgagattgcctcttaggagaattctagaggttaggctaggcttgagacattatagagaacaggttacagcaccccatttttactttattggtaactgagaaagtaagatatattcctagcctcccagtcttagtagtaagaggtacttttaaactgttaatttttatgagcaacacagtggtatggccggcccttcctcctccttcagggagttcatttgatgtagtttggttgattcccatgcatgtggaatagctatgacatcatcaaattaagtgtacactatgtgctaacaattatcggggtgtcaagagtgaaacattcaggtcctattggcagttctaataggtgaatctcatctcactgttttatgtgttcagtgaagtaaatcttcagtaagtctggagtagctggggaagccttcgccaagaggtgaggtctgagctgggccttgagcattgctgagatctgaatgggtggaaaacagaagagaggtcattccagtcaaaagcaagatgtactcaaaaaatagcaaggaaaaacagatcacctggatgagatagcatttggggaagggtaagactatagtatggttggatttattgaacaggcacagtgtcaggaatccaactggctactttatatacactacttggtgttttatcctgcaaagtaaccctaataaccagtagcatttgctgagagtgtatgtgggtagcaggcaatgtatgagatgccgggaatacagagaaggatgattcgatgtttgccctcaagacctcagaatgtaagtctaggatatagtaacaaaataagtttattctagtataataggaatatatacactttaccaaggaagcatagagagcagaaccatttgctttgcctgctagatttcaaaatgacttctcagagatggtgagttctgagctgggtggtgaaggatgtgtaggagtttgtcagataaggagatgaaacaggcattccaggaaaagggaatagcaagttcagagacttggtatagtcctaaattatgtttgtcttcatttcagctagtgctatttcattgttgctggagataacacacacttggattccgttacgtattttcaccttgccaacttgctttgtttgcagaccataatttctgagtttatctctacagcaggttttcagccaaattgctctactaaaataaccctaaaaatctatcacctctgttttctgctgctgtcactggctgtttgtgtccttacttttcagtcaacctcaatggagactggaaagagaaatacaaattgccccagaaagagaacacaggcccctctcttcagcaacagggtgtgagtggatggggaccattatcacattatctacacagacaccgttttaatccacattgccaaggaggagaggaaaatgcatggccttcacagaacatcattaggagggtgggccattgtgcagcatctattgttaatgtcaatacctacaaacatgtccagactcttccattctttagcatactcattctctgagtggtattttatgtgtattattctctgagaggtaagcacggacaagtataattccatttttatgtaagggaaagctgagtaaagaagatgcttaaagaataggtggatagaaaaatgaaatgacttcagctcataagcattttgagtacctattatgttttagtcattatggtagaaacatggcaaatggatataaacaaaaaacatataattccatgcctctgttcagattgttgtctgcccctgagattcctctttttcccactccccttgactaactcaactagccctgctttttgtttgcctgtttgttctatttattttttggaggacagggtctcactctgtcacccaggctagagtgtagtgatgcaatcacaacccactgcagcctcaccctcctgggttcaagtgatcctcctgcctcagcctcccaagtagctgggactacaggcatgcaccatcacacctggataaaaattattttttgtgtaaagatgaggtctcactatgttgcccaggttggtctcaaacttctgggctcaagcagtcctcctggcttggcctcctaaagttctgggattataggcaccagccactgcacccagtcaactagccatgtcttttggtccaacccaatgttgcacctttgcataacaaaggcaattaaagaccacttcttccctcctgccccctgcaaaaacctaatagttctcaaacacattggttcatggaactcattatatatgaaaacccatcaacatccacacaattagcaaacttaaccctctgcagggttgacattgagttggaccttaagatatattcaaggctagttggctgggcttggcttgactcccccttagctctctctataaaagcaatgattactgtattatattggttttcaaagaattctgtcccacattctgttctacttattaccttctttgcttgactgtgatagattgaggccatctttctgtctgtccctgtattaatacattcaggctgctgtagcacaataccttagcgtgagcaaaggaagttaaagaccacctcctccccctgccccctgcaaaaacctagtagttctcagactcattggttcatagaactcattatatatgaaaacccatcaacatccatgtaattagcaaacttaacacacttgaaaatgctacctttcaagtcagtattcatattaggcagactttggagatgttgtggattctgcttcataccaccacaataacgtgattattgccataaagtgagtcacacaaattttttcgtttcccagtgcatataaaatttacgttgacattctactgtagtctattaaatgtgcaatagcattatatgtaaaagtaatgtacaaaccttaattataaatatttattgctaaaataatgctaaaaaattatcagagccttcagagagtcataaccttttggctgatggagggtcttgtcttgatgttgatagctactgacagggtggcagttgctggaggttggggtggctgtggaaatttcataaaataagacaataataaagtttggtgcatcaactgactcttcctttcatgaaagttttctctgtagcatgtaatgctgtttgatagcattttctaaatttatttcaaaattggagtccatcctctcaaacccagctgctcccttatcaactaagtttatgaaatattctacatcctttgttgtcatttcaacagtgttcacgacatgtttaccaaaagtagattccattttaagaaaccacttttcctcatccataagcagaaactcctcatccattcaaggtttctcatgagattgcagcaattccatcatatcttcaggctctacttctagttaccttgttctttccatcacatctgcaattccttcccccactgaagccttgaacccctgaaactcatccgtgagggttggaatcaacttttttcaaagtcttagtaatgttgatattttgacctcccatgaatcattgatgttcttcatggcatctagaatggtgaatcctttctagaagaatatttcaatgtacttcgtccagatccattagaagaatcagtgtctatggcacctatagccttatgaaaatatttcttgcatgataagacatgaaagtcaaaattattccttgatccatgaactgcagaatggatgctatgttatcagatatgaaagcaatcataatcttcctgtatatctctttcagagctcttgggtgattaggtacattgtcaatgatcagtaaaattttgataggatgttcttttctctctctctttttttttttttttctgagcagtagctctcaacagtaggcttaaataaaccatgatgtaaacagatgtgttgtcatccagactttattgttcctttgatagaacacaggcagagtaaatttatcacaattcttaagggagccctaggattttgggaatggcaaatgagcattgacttcaacttaatcaccaactgcagtagcctaaaacaagagagtcagcccaagactacaccttcgtccagcagaagactgttttgtctgcattgaaaatctagtgcagccatctttatcaatgatcttagctagaacttctgaatagcttgctgcagcttctccattagcatgtgctacttcaccttgcacttttatgtatggaggtgacttctttccttaaacctcatgaacaaacttctgctaagcttcctacttttttttcctacagcttcctcactcttcttagccttcatagacttgaagagagctagggccttgttctgggttaggctttggcttaaggaaagattgaggctggttggatattctgtccagacaactaaaactttctcatgtcagcaatcaggctgttttgctttcttatcatttgagtcttcactagagtaggactttcacttttctttaagaactttttctttgcatccactacttggctcagtgcttggcttagcttttagtctatcctggcttttgatatgtcttcctcaccaagcttactcacttctagctttttgtttaaagtgagagacatgagactcttcctttccctgaatacttacaggccattgtagggtcattattgacctacattcaatattgttgtgtctcagagaatagggagacccaaggaaaggggaagagattagcgagtggctggtcagtggagcagtcagaaaacacacatttatcaatccagtttgggcaaggtgtgtggcaccccaaaacagttacaatagtaacctcaaagatcactgatcacaggtcaccataacagatataataataatgaaaacatttgaaatattgtgagaattaccaagatgtgacacagagatgtgaagtgagcccatgctgttgaaaaaaaatagtgtggatagatttagatttgcctaacttaaggttgctacaaactttcaatttgtaaaaagcataatatctacaaagtgcaataaagaaaagtgcaataaaatgatgtttgcttgtagttttaaagttttgtatgaaaacagtagttggataaattgtttgcctaagcctcttttgtagtcagagggctattgtatgtacttggaaaaagtgtacatgctagggacttccagggcagcttgcatccctgaggacgggactaaaaataacagagtcccctgctttgtgggacctaaagcttgtacaatttgtgtgtgtgtgtgtgtaacgtcttgagtaaaaagaattcaaaatataaaaatgatttcatttaaaatgaaaaaagataatgaaaaattacagattttaagaagttggtaaatatcaccgaaatggataaattaatttactatttgcaactaactgcttgacattcttctataacacttttttctataaaattaataatgttcgctatgaatgccttttcatgtgaaaattctgtaatattcctttctacagataggatagaaaggtaattcagtctttcctctggcctggttcgtcaaactttctaaaaaattatggatagtttttagagtttatattggtaaatttaagtgaatttttaaaaaatgttataacttctggcaaacctctatcaaagtacaaattctggtcctgggtgaccagagaggacccctaggtaagacagcactgggggtgggaggagcatttctggaagccattttgacacctggacagtagcaataacttaattctacaaggacaagattgtaagcttttttttttttttttttttttttgagatggagtctctctctgttgcccaggctggagtgcaatggcacaatctcggctcactgcaacctccgcctcttgggttgaagccattcccctccctcagcctcccaaatagctagtactacaggcatgcacctccacgcctgggattacaagcatgtgccaccaggcctggctaatttttttgtatttttagtagagacagggtttcaccatgttggccaggctggtcttgaacccctgacctcaagtgatctgcctgccttgccctcccaaagtgctgggattacaggcataagccatcacacctggccgattgtgagctacttaaagataccccaccaaagaacttaaagtgttccatctcagcaccctggccctgtgttgtcaagctgctcccccttccatcatactgtgcactgtatggtgcctctttatgaaccagacgctgcttgtgcaacagaggctgatcccactgcagagactgtatttgtcttctctttattttactggaagtctttgccaccatccggctggtaattgctccacaccacttctgaatcgattgcttttagagttgttgagcttttattactactactcattggggagagaagagagaaagaagcaggttggcctgggctctgcaagagacggatgttgtcaaattgtctttctccagctgttgaatacaactcataatgctattcaataaaaccagaaagaaaatgagagtacaagggaaagaagagatgtcagaaagagagaacaagagaacatacgagtctgccttctcttggaatagacagcaaagccatattgtgatgttgactatatcatgcagtaatggtgaacaaatgtagcaagaagtaaaagacagagctatttaaatatatctgtgggcaattgcacaaatctgccacttttgtaggtatactgatgtttcctcattcctggagctgagaaaaagggtctatgttttgctttattttatttctttcatttagtttggtaggctatgtaatttgattcaagtatgatagaatttctccttagttatacacattactgttattttgctagtaagtggctttgtatccacaatcaggacactcttatgaactgtttacatctgctattgactgatctcgttgcgtttcctcatgctttcatcaaaaggtagcagttggcagggccattcactggagaatgaggaacacgcataattagatttagtgaagaacaccctcattccaattggaatctgtctttaagaaaagaaaagaaaaaaagctccaggttaaggagcttcgaaagactgaatactgatgtaacttttgttcatgctaattactcacaacccagataatacttcgtttaatgattttatcccatttgttatcccctataacattcatctgcataaattagtttcttgtcaacctttcagaaagggtttaatgacagttcatggtgtttacttattttctaaaagtagtctaagtgagtcattataaattgaacattcaagttaaatttgtctgaaacatatataagtatcatataaatttcagattttacacagggttctcctctactaagcaggtggaatataccccccatttcagaatgccagtttaaattacttgcctggggtaaaataccaaatcagagttggacataaaacccaggtatccttattctcattctactattctaataaccagatccaatgctataatgctgcaaattataggccctatttttcgagtaggatgcatgtgaatgtcatttgtctcttaaatgcatgaatagtgtcttcccttgtggtcgctctactgcttccagcctgtcatgtcaagcagcattgcctttattattgaaatgaagacgatacttagatcattgatctcaatggcatttggcaccataagaactaccagtctgttgtatcatataaaatgatactgcctggtatgcaaatcagccagtgtgtcaacaaaaatgctggcatcagatagaatgtccaaattgctatcactctgccagttttacacctacatccctattagttcctgtctaattaccaatgataaaagtactttgaagtcccactgatttccatgtaaatatcatacaaatttggatttgctttaacattataattccatcagcttagaagttaaaatttagaaaagctgtagttcattagtttaagtcacttcaaaacttaccttgcttagttttcagatagactcccatcctatacttctaggactgtacaaataaaaaaatgaattaaaagacatttcttgatgggtttaatgttttctactaattattttgacagacagtcataatctgttctgagttcttcttttctccttccatttcaattcttcataaaacatggaaaaaactttggagactgaataagatctatggtaatccacaatagatgaggccctgaacacaacatagggaaaacatataacccacccccaataagctcaacttactgtaaactcttgaggagtaattagggacttcagcagtctctctgaaaaagccaacgcattgtaaaacccttttagtttttacatgaatattaattctttgaaagtagatgaaagactttctttaatgctaaattcttatccatagagaataatattagagcgaggatctagtgtattattcccatttcatgaataggaaacggagaagtagagaattttagggaccataaaagtgacccaagtgccatgtgtcaaagctaatatacttaactcaagcctattccagtgggttctcacccttcacttgtgccctaaggcctggcagcttatttcaggagggacacccgttgttggtgtaaagagcaagatcttttatgggtatcagttttaaggggcttatgggaataatcaatatgctatggaagtaatgaagatatttaacgtcctgaaaattctagtctaagctttgagaatgtgaccataaaattgacagggattaactttaatatttgactagttaacggtaggattttttccgttacagtgcactgtgtcaaaatttggtctcgttaaataaattcctattctatcagggatgagcttcccacaaataatgttaaaaaaaaaaaaaaaaggagaaagcatgataaaccttttttcctgtttctcttcttctaaccacagggtgcactatggcagttgcagggcttggtaattgaattcagttctgcaacctgaatacatttctactgtaagtggatctccctcctctaccagagaaagaaaatggcctcaaatgattctgactggaacacagcagccacctctcttgtaaatagctgggtcttattgacttatcttggtagggagccaaaattgctgcccagatgagtccaagcagtagccagaagagaaccagctacttatggggtctctgtctttgtgaaataagtattaagagggtccatcttaaagaaggaagagaagtatggtcaggtgagtcaggcaatgatgcttagtgaagtacaacctcagagttacggtttttaataatacgcaaaattacatgtgtaagtgtattgatatgttttataatacagcatgcccagaatctcaaaaagattaaaaaaaaaaaaagatgttcctaggttctaagtatttttctttgcatagtggtttgagggcgagtcaagtttataggtgtgctgacctttaagagagttaggaataaaagagggcattgagagaaagtggtttgggtcgcagacaccatccctcaaatagctgacaatgaaggtctataataataattggcattatctcaatttgccaggtatctttagtagaatgtgctttatctaatacccaaggtagggtttcaacaatgttgagaatctatttatgaaaaggccaagatgataatgttagctaagtgctaaatataataaaaagtagtcatgaccaccattctagacaagcttcattgtcccgcacactttatctggacctgtggtttctggatggttaagcggcttgtactcacaaagacaaattgtgcattcttggaatacattcttggaggtctgagagttttctgtgagtggtgctgaaagtgtatatttcatctcaatgacaatctcaaaaaattataatgcaagcatattctgaatgatcttgttgaccacctaataaccaggtatttttatagaattttaatgcttgtgttgagttgtgttcatggggaacaaacctgtcataccttatttggtaaggactattgagaaaagagcagagccaggttgagaacataaggaatgcatttatgtcaaggaaaaaataaaatgatgccagagtctgattttaaaaacaaagctatctcacgatttcaaatggagaaaacagggagggagaataaaatcacagcaagcttaattaggtgtgagcatcatgacctcaggagaacctgggccagagaagtcaggagtattaatgtttaccatggaactggtaatttcatttaaaccaagcagcatcagctgtcacattaaattaatattattgaaattttatagcatttatatttatttgtatttaatttataaatgggtgttggttgtgtaagtgctataagtataaatggattgtagctagttttatgtttgtgtatatatatgtgtgtgtatatatacatatatgtgtgtgtatatatacatatacacatgtgtgtgtgtatacatatacgcacacatgtgtatatacatatacacacacatgtgtgtgtatatatatatacatatgtgtgcgtatatgtatacacacacacatatgtatatatatgtaatgctaacaaaaaataatttgaatgattgccaggggtccccaagaatgagctttttcttttaaaattggcctgtactttctttgagaagccttgccacgggtagaggagctattcagtgcctattgagtcaaaatttggccttaatataaatggggaggttttcccttgccatgtttggtgcctgctaggtatagtcacttgctctaatttcagtagggtggtggaaattaccaataggcagaaaaagacagctttgctgacacctatttggttgaattttacaaaatggaaggatgaataatacctcaaaggcaatctggtagattctttgagggaaagagatgtgtctatttacagggaataaagctaagcacattgactgttcttaggttaatggaaaagaataaggctagtgtaggagccagcaaattatgtttcctccataattagagtcttataaaaatatcagcgtgaattacttgctaaatacaaattacaattgttaatgtttgttaagaaaaataattcaatttagagcaagaatgaaagaaatacaggcacccaagaacaggcacagaatacaatcactttaaccaaagcttagcatggattattttcccccacttcagcttcaagtttattctaatctttttctggggggcaggagacagtcggaggggaatgcatctgtatgtcccagctgtgtggcttctgagcctgacacccctgtgctctaacaagacccagggaagaaatccttagcaggctcttacccttatcagaacaaagctatttagttgccaccttaactccagtaattaactcagtggagcaaatttccttatttcatgtaagatgtgagccaaaactctccttgctgcacttcttctatctctgggataaagccaaacagagaagaaactcaaggaccatagaatctttccttgcttttagttttcctttgaggccctacctcccaactccctcctcacctctctccttgaccactgagtagtaccactactcagttaatactgaattttcttcttttccaagccctgcagtttactctagaatttctactgacaaagccaaatcttgctgtgatttttgcccccatggagaagcatgtattataggaacaactaaccctttataacttaggaggccctggggcttcattgcattacagagtcatacaaccataaatgcccagacatacatcaccagggttaaatcattttcagtatgaaatgatgtaatccaatttgaacactgcctcaaacccagtgcccttcatgtggtaagtattcaatacatacctaatattttaactttatttatttttacctcctccgatacaaaaaaatgtaaataaccctcaatgatctgtaaaaaatcacttagttggaacactttgttcatcctctagcaatgtctgataagttagttatcattacatcatgaatcatgatactcctcatcaggcagtaaaaatacagtaatttcgtttaattgaagggaaatacatgtttaccttggtaaaacttatatattatctttaaataaataaagggttatcttgttcaaatagcttaaacccataatcaaatgttgcttatagaggtcctgctttaaggatctcataatgatttgcatatcattagcttgtcagaataccatcctaaaccttgctgatatctgctctctttgcagttcattctttgttgcatccaagtattacagtaagttgttctctggcaatttgtttatactaatgatttgacagttattttttgacccttgaatgacataattatgttaaatacagtttaggctagcttgtgttcaaattgacatgaatttttaaattagtaatgttggtatctagtatatgacagaaatgaaaaataacgtattttgtatttatgcaagaaattatctgtaccgatcaaaactgacctccggacacaagaccagactggacttgcatatgttaatgggaaacaaaatggggaaggggctcctaattacttaagtttattaagaatcccaggatacctcttagaatggtagaggtgatgttagcccttatgtcctggacatgatccagtttaggtaattgctaattacaatctgtctacttaattcccacggcccttgcttctgaatgttattttcttcacttagcaatatttaactattatttgctcttggtgtgtgactgttggaacatctgctgattcctccttctacgttcggcatgatttgcttttcatttggttatttgataattattattttcatattatttttgttctaaatatgtctatagatagaaaacagaagccctgtaaaagttttagatattttttaactgcgtgggctggactatgctttgtcaatcgagcatacagactttctggatgtaagtttgggaacagtgggcataccactggcccatgaaacactcactataagatagtgtcaactcagaggtgaatcacagatagaccagggttttcagtgtcttcaaaactagggctgaaatcacagcacttaggggcttataagtagatccctctaaggatctatcctattctggagccattccaaaacaagagtacctctgttttgggtgctagagcatgctttatttcaatcacaattcaatggaactgaagaacagaattagaaagtgatgagtcaaaaattcttattcaccgcaaatacagggctagataaactccaggtattccacacagtttccatccctctgaaggaagcgagattactcttgtgtccgctcagctatgagcaccttgatttgggatatattgcttggagttcagatggagaagacatccaggttttatctataaactaccctccatatctctaaaagttacttagaggaaatcactgagttgaaacttcattcattccctagcattgtcagatgaactgaagcatctttttcaatagtcaatatatcctgagccttcttagtgaacacagtgcttagaactttcaatgaattcacctctctaagattatggactacatattccaaatgtgtagattttgacctaaattttacccattctacagaaaaccaacaaactccacctcagagagatgttctcactatatctacccaccagggtaccagtctaaaaggccccaatattttctcctgtgttttctgaataattgtgtttgagctagagccgggagactcctcctgtggcttttattaatggaccaaagtttggttcctgtgaggactgcaatgtgtgattcaaatgcccagtccatgattcagctagtgaggggagtaacccattttatcagttgtgctgtcttccactgctgttctctatattccatcagaggaaacaaatggcttctattgtgcataagaatgccatttagtcccaagcaccatttgaaatggaaatgaggagtaacagtaacagaagaacattggctaataattgtgctctgaatagccatttggccatgtgggcagggtaaaggtaattgtgtcctagagtaatacatcttctgagcattccctgagactataattgctatgttgatgggatgcatttttaaacatgtgattgcggctcttagacttaaaaaaaaatggctattttcagaatgatctgactttaagatgtcaggcaagattttgaagtcagaataacaacacacaaacacagatctaagatgtattattgtgtagctacttgtctaactgcatttttttttcttaagtctcaccctgtcttggtgatacacagattaatactaacctcctaccaaacaatccctgttgccactctactgaaaatacattcttgccttccacaagcagaaggctgagtgtctttgtggcttaggagagaacaaaaacacatctatgtattcattgccttgttcacttgcacaaacggagaaaactctttgaaaacatcttcctttctcctgagtgaaagaatgagcaggcgctgcctcccctgatttactgcacccatcctaatcagggtagatgattctgatcttgcattaaacaattactatgcaggctctgggcttaagttttgacttaagtttagaaattgagtagttcccacaatgccctccatttctaaatgtatgagaagaggatcaacaaagaaaaaaattaatgggcttttgaatgagcaacgtgtgtgtgtgtgtgtgtgtgtgtgtgtgagagagagagagagagagacagagagacagagagaggcatgatcttggctccctgcaacctccgtctcccgggttcaagtgattctcatgcctcagcctcctgagtagctgggattacaggtgcccgccaccacacctggctaatttttgtattttttgtagagaccgggttttgccatgttggccaggatggtcttgaactcttgagctcaagtgatccgcccacctcagcatcccaaagtgttgggcttacaggcgtgagccactgtgcctggccaacagaacatattttaatgtctgaaaaaaaagaagaatctactttaaacatcaccagaagggatacacccttcggtgtccccaggccttgctggcttgctgtgggtataaagcattaattcttgtcatttgctggttatagtcctccaccaaaactcttcagttcttggcctctaattcaagctttcttccaagtttctctccactctcactgtgtcatttctaggaggcctcagagttttccacgctagaacacagtcggtactctcatgtgtgttttcattttagcctctttgttgatgtctgctgcctgtcaatccacctgggtttgtaaagtccctgaagcaattcctgccatgagaatgttccttcatccagaatgctgccttctatgctccccaaactcaaagaccttcagggaccagtaaactcaactgcccaaagccaagcacagctgtccacagaattggggcagagattcttctccataggactctggcctggtgcataggtttggctgaggaaaagacatgcttttctccttccccttttcacttctatcccttttcaccaggactcttgaagaatattctcacaggcctcgtttcccctcaggtcagaaaatatgtgcggaacagaccctgagatgctgactgtgcaaggctgttcagacccagtcaggtcaggccctgaatccttgtgatatggaatgagatatgataaattggaaattgtctttaataaattgccattcgtgataattctagtgataattaatctgctgaggctgctataaaatatcatagactgagaggcttaaccaatgtatttccacatagttttggaggctggaagtccaggatcaagaacaaggtgctagccaattggctttctgtgagggatcacttcctggcttgcagtcagctgccttcttgctgtattctcatatcacctttcctaggcagatgcatgcagagagggcaagtgagctgagcaagctcactggagtcttttcttgtaagaacactaatcctattggatcagggccttcacttttgtgacctcatttatcctcaattccttagaggccccatctccaaattcagccatattaggggttagggcttcaacagatgatttttggggcaagtattcagtctatgacaatcctcatttaaactcatcagggaccattgataaaatgctattcattcttccctatgctggtgtggaaatttgccacccaatggatgcctgcaatatatgccagagactttaggtacgctgtggcatggcttagtgactatgagaagactgacatattagcttggactagcttttgttaagcaaatggactattttacaatccaagaaaatgaacaaaattccgttttacttactcaagataaaaatgcattgatactgcaagacatatcctcactgaaagatagggtcacttaaaatatcccatttaaatgcaaaggacactagaaagtatagcaagacaaggtaaagaaaataacaaccttgctaacatatgactaaaataggaactggcagctgggggtgatgagagaaatgaaggcagtcagctacacactgactgccggggagcatcctgcacctcagataagggagcttccgcaatgaatgcctgggcctttggctttgtttcaagtcttttgatctagcggagtccataggatcatttttcccgtgggccagacctctggagaagcaattggcattgttagtttgcactgttagttctgaagctagtttggtaacaaaaagttattgtagtaagtgcacttgtgtgtgtatgtgaggggtgtggatagatgatcatgttcaagtctgtagtagaaaatttctaattattgagtctagagaactaagaatacttataggaggtaattaatccttacccgacatgtggaaaatgtcttataacccttctgtttaatttaacaaaaatatagtctactgttcagatggttaccactcggagcaactcaaactatttccctacagattttcctgtagagaatgaatgagaaatttttttgtttgtttaaggcctgaaattttactaccaaagtcaaattttgagtattgattgttgagtcctgaggatggttatattatcatgacaaatcttgcttattgtttttaattagacaaaattttcaaataactgtgagttattacatatctcttttattatagtgttctatagattgtattttgtttcattacccacactacacacacaaaccacatatacacatgcacaacacacacacattctttctatacttcatgtgaatgctttgagacaatcctatttaacattgacaatgaacaggacagctggtctctcaataaaatctaagataccacagtagtatctgcaaataatatataaattagaaatatttggaatgtttagtttatttgctaaagctcttcagaactataaattacaatattaatgaacttatttttaattcccatcactttcatttttatagaatccagaaataatgcatgtaacttgccattcctccccattagtacacttgagtccaaaggagaggttcacagcatcgtgctcttttgtgatgtggtttagaagaaaaccagctcaggacaagtggactctgaaaatagcagactttcctttactcatcttttgagttttcagagaagagtagagattcagttcattggatattttctttgtactaggctccatgctagaaattggagaaaataataaatgagaacctatctttaattaccattctagaaagaagacatgtacattaaggataatatgtaatggatgtcataatataaatatgtacaaagacaaggtgtagcatagaaggcagatgaattgttatgttgattggagtgtggtttctgttaagggatgacattaatgaggtatcgcctttgcaacttcaagaatgaatagaagttaatcagacaagaaaagaaccatttcacaaggaacaatatgtacacataattcaagacagccagaatgtgaagtaagaggagactcaagttttgtcagcatattatataagtaagggtgagttttggctttgagagttgctttgttgtgtttttccagatagatgtttttcagatatcttctcccctgtgagaaatttctgcaggtttgattgatcctttcagatgctttttaaatatatattagtttcatcactttaccacattgagagtccatgtatctttgactcaaatgcctaggaacagaagatgtgaggaaagggagagagagagattctgtcatttaacaattattattcaagtacctaaaccaaatcgaaatgcctaaaggaatgcagtgggtgatgtaaaagaaggtgtagggcaggtgtaacaacacagaatggtagagaggtgggaggtggggggacgggagagtacgcagctcttctaaggtgggcagctgccttatagcttcagccagttgtcacacagcactggttttgtcagttttcagttctttgaaaaaattggaaatgtgaaattttatatggaactgtcaatttgtggaagttagaaaccactcgcaggccagcactgggaaggccatatccagcctgacttgctctgttttatacaccatgcactctcagtggttgcctcaagggctttagaaagaaggtcaaccctttgccttgtggcttttgtgcattgctttcttaagaggaacataaggaaactctactgttctcagctgctgttgtggttacttggccatttgtaagacttatatataataatgaagttgtcttggagggctgccatgtccgtgatgtagttgcttatctaattttgtaatcttttatcaattccctctacagcttgaaggccaggctgagggtatggtacagaatactaagtggtttcaaatcaagtccaatctctgttgcaatttttattgtgataacaagatatattattaataacaataaaagacaataataatgtattattatattgtaagcttaccatgaagtgtatgggcaacccaaaaagatattcagccatcattaaaatcttttctaatcacagccacacatttcatattatattaaggaaaaacataaaagcaatcttgatgttaagtagaattagtaaagacctaaaggagtataaccgaataaacacaaagtagaataagtaggccagaatatgattgtattctatcaacaatgttatatttgcttagaaatctcttatatttcttcctccaaatatgcgtgcatgcacccacacacacacacacacacatacatatatacatatatgtatatctgcaattgtctaaaggtagatggtatagcataaaggttaagagtgtaaatttggggttcatactactagagtttcacaactgcctatgtagccttccaaaaatatttagcatcctgagctgcagttttctcatctataaacaaggattaataatagtatttatctttgtactattagatatgattgaataagatatttcatgtaaatcatctagcgtactgccagatatattttatagtcattattaatgcaaatcattattgtatcattattattactggagttttaactctctggctgttggcaggaggcctcagttcttctacccatgggcctctccacagagctgcttgagtatcctcagacgtggtggctggctttacccagggtgagtggactggggggtttggggaacaaactaggtagaagaacacctctaccatgtctattctttagaagcgagtcacgatgtttggcccacaataaagaagaatggaaatatttgctaaagattttgcagatgtattttaaagccacaacaaggcaaagggttattattcttaatttgcagaagtaattgagactcaatgagattagataacatacccaagaaaacacagtaaattgcataacttatttactggagctcctccccaaacccctaaactatgtgacattcttgctttaaaaaaaaatggattatacagcacgtgtcaccactgcattctcttttttatgttgttcatgtgtgtctgtgaaatgtgccttctaataaaaatttgaggatcttatacttttccagaatcattttgttgaagtcatgttttggagtacatttgtatgcaatccgtctgataagggaagtatatttctcactggaattagtataggcggaaaacaccatcaatcatagtcatcacaaagcaattaagtacctaattgttcatggctctgagtttgctactgaaacagaaaacttcttaggcttgctaagaaaacttcttaggcttctaagccctcctggggcttggaatccaagaattcagtagaagacggaagcgtggtaaggagaacaagaactgaagacataaacaaatttatttgaaatatggttgcagtggagcagggagagtgaattcaggggaaagaaaaataaaatgaaataagatgctgaggttcaagaaaggataaaaggtaaagtggctgaatttaaatgacctgggtttcagtttttaacaaaacataaaaataactgaagaaaggctctatattttatttaacaataacaacaacaaaaatcaaagtgcttgtttatcattgggactcaacttttgcagagtttttgccttaatttttttctctctaaagcagaatttcccatcactttagattcctttccgtgtcaatgatggcttttaatcccaatttccatcattacccctcagtgaaatgattgcttccatgtttgagtatatatacatatgtctgagacttaggtcaattattttcatgcagaaatcggggagggtgctcctgtttttcatatgcatttgtaaatattttcaatcaatcatgcatttataatccaattgggaagatatgattcagacacaatagcccgtctgctgcaagagtctgttataaaattgatcagttggccaagttatgctatttttttaagttactttgctttctttcagggaagaagaaagacaaaaaagtccagaaaccagcagcagcaggtgctgccaaaatggtattcttcttatctgtgctgatttcaaggggtgtgcaaaagaatgtgtagttgcttttctctctggctgttgggatggcgtctgtctctctggcattatccacttatttgatctagctaagtataggagcagaaataaattaaaaatgctttttcccagaagccccaaggatgttattcacacattctcccttctactgatctctgccagtggtgtgtaaatatatatttagggggaagtggctgaagtcaaaagctctgttggatattctttccctttcagttacttaccttcttatgcacaaatagaaagagagaaatcagaatagcagagaaattaacagacatgacagcacaacaccttctttcccatgtgctgatttgaagaggctcatgtatttatgtcacaaatgtcaaaattcaagtttctaagcaaaagaaaaaaggaaaaactgctaaatgttaagtgatttgcttatttgaagagttgtattacaaagcaatggaatgggagagctctcccagcccaggaaagacaaatgggaagacgggtctattttcattttggcattggacagaaggcagccttctggcctgctgtcacttcctatctgttcagtcttcgttttgcttccccgctgaccatggatcggattctgactcatatcagagactccctcttctgatcctatttatttatctgaggattttttcttttctttttccatagactcctagaatccagaggaaactcagtggcatctctcatattatcctaagctttctcagaaatgtgacatcaatattttaaaattttcagtagttatcaatatttcttaaatctagcagtaaggatggtctttgaaatatcttttctaaattccttctgttataataaaagtcagtgctcttttatatggtttggctgtatccccacccaaatcttgccttgaattgtaatgactcccacgtcaagatggggccaggtggaggtaataggatcatgggggcagtttcccccatactgttctcatggtagtgaataagtctcatgagatctgatggttttataaatgggggttcccctgcacgagctatcttgcctgctgccatgactttgctcctcattcaccttccatcatgatagtgaggcctcccaagccttgtggaactgtgagtccattaaacctgtttttctttatcaattacccggtctcagatatgtctttattagcaccatgagaacagacaaatacactgtttatcatattcttgacagcaataaaacaattgcttactgtcagctcttaacaatctttagtataattaagatagtctatttggattctttttcagagccttctatttttcagtcttttgaatgtactcttattgctaaatttggaatatttttagttttgctgcatcattttttgaatttacctttctcccctcttttgcctattcattattcaaaaccagatcaaacactctttctgtgaagtcagtaacttactccttcagaaatgtaggtacattgaaattggtaaacattatcacactttgtacatacttttacagtgactatgtatatgtgtgtgtttgcaaaactttctgcctcattggacaataaactcctcaagtgcagagatcttgtgttatttatctatgtgtcttcagatactaaatgtggcacatagtagagctccatacatgtgtattgagtaataaattaatgaataaatatgatgctggtggcaggtaaattcttggtgtttactttgaggtccggatcaatacaggatcaggatagtgcttctcttacatctgtttgcacagcagaactgtactgcactgaccagatgtctcaaagtaatgtccatcttgcctggaagtgtctttccttacttggggtcttttaccttcagaaatccaggtgcattcacaatctgcactgttattataccaactctaggtgaaggatgcatgatccaaaggtccagagtttgaaagcttgcagtctgcaaaactgccctcacttctgatttgaattgcaagttcaggggtttctccaaatcactttcagatttgataatttgctcataggacttacaggactaactgaaagctgttggactcatcattgtgatttattgtaaggacaggatacagattaaactcatccaaggaaagggacacatggggcaaagtgagagagctccagatgtgtagcttccagttgccctctcccatggggtcaaataactcctccaggcaacagtgtgcgacaataggcacgatgttgctgacaacagagctctcctaagctttggtgtctgcggtttttggaggttgggtgggtgcttcagcacatacacatgattgcccatatatatatagctaatctcggtctccagcccctcaggagatagacctgagaccatgcgccccaagtcccacaacctaagccgcatcgttggtgtgactcacaacccccaccataagtcacattgtcagatattctggcatggcagcacccacactaaacaaagatgtggctcctactaggcatgctcctcctagggctaaaagatttcttcctagaagccaagagcaacagccagaccattccctgggcaagattaaattccttactgaaccacattttagttcttccacacaggtctcaccaaacctataatttccaagtgagagaacaggaagcctcatcttgctttcacagcttgagacaaggcaaaaggaaacgctgttttgaactttgtagtcagggtgggtgtgtttacaagggatacaatcccctcaagtcaatttaaatcaagaatctatatgtacagtggcatacccagggtatgtggctgtaagtaaatcgtgttttaactctctccctctactttcttcctctcaatgacaaaattattttcagtaataattatttaataatatagtaattctcaccatattttaaaattgctcttcagttttaaaacaatttacaagttagaagcatacatttcaattttacagctattattcaaattcagtagaaatatttcacatatgacctgaaatttgaacttaccaagcaaaagtattatataacacagacttctttttttctactttactgagtgagtggacacagatgaaaaattctaagttagaaattctaagtggtcctaaggaatgaccaaattgaataactcaagttttctttcttttgtcattacaatcagtgtgctatcactttttattttaaatgttggtttaagcaaatgtgtacgtatgtgtgagatatatatatatttcatatatatatatatatataatatatatataatttcagcattaaggagacattgtgcccacataaagtgataatgagactggaacattacaaacttactccttcaacgaatgcatgtagccaatctatgtgtgatgggactgataatataaccaggagctctccaaattatcattcatgtagaatacaatggtttttaaataatcggtaatagaagttattaatttgaggcttacatatgaatctgaaatgcaacaatgtctgtagaaattgtttagaattttgacaagatttgtttgtggatggagtttctttttaaaagattgatatataatattttacatatcagtggggtccatgtgatattttgttgcatgcataacgtgtaatgatgggtatttgggatatccatcaccttgagtatttatcacttctatgtgtaggtaacatttcaagttctctcttctagctactttgaaatatactttgttgctaactatagtcaccctactctgctatcaaacattagaacttaaaccttcttctaactgtatgtttgtaaccatttgccacatctctttatcccctcatcccacccacacacccattccagcctctggtatctatcattctactctctaccttcttcatgagataaacatttttagctctcatatgtgagtgagaacgtgtgaaatgtgtcatctgggtcttgcctatttcatttaacgtaatgacttctagtttcatccatgttgctgcaaacacatgattttatccttttttatggccaaatagtattcatatatatatcacatattttccttatccttgcatctattgatggacatttaggttggttctataactttgctgctgttgtgactagtgctgcagtaaacatgggagtccaaatgtccctttgatatattgatttcttttcctttggataaaaattcaatagtgggattgctggtggatggagtattttatcactgacattgtttagaattgtgaagggaaagcagaattaaattttctgtctctttaaactcagtcatcttttctctatagcacaaaagattatgttttttttttttttttcataactcagcatctttgtgagctatgaaacttgccctgatagccttttcttgcctagggtaggatatattctgaggaagggctgggactgcccatgcattcctgcagagcattcacgggtgctatttacagtcctaattaaatggaggattattagaaacgggaaggcagctataaatagcatggtccattttatctgtttctttggtgtgtaggaagagcattgctaagattctcccttgaagttcagttaactcagaatgtgttctgcttttgttattctgctttggcttaaaaaaaagtctcctgatgctgttcaaagtggggaaaagaaaacaaaaacaaacaggagtcactctcagtcattttagcatatggacagaaggaacacagaatgaaatagagttggggaggggtgtgcacggtataagaaaaaaaaatgtgggcctaatcctttccgataacttttttttctgaaaacaactattaataaatcttatttccaagtctgtagaatattggttctcttcatccaactgtaatgtgatcagtctgttcagggagcagaggagtgggtatgggagccttccctctccgtggtcctgttagggcaccttttccagggagtggggactctgctggcttctctttcagcacactggacggtgcagaaatcagctcaactctagaggcagtgctgggattggaatggaacttgacctggatcaaatcaccgagcctttgcaaattcctgattttccaagttaggacatatctttagacccagagcccttaatcttggctcttgggataagcttccttactgcttctctcaacactcatctccacctccagcctctgctctacaagctgccactcatctaccttacatctctgatccatccccagtattcaacagccttcagcatttcttggttacctgttttaaatttcccaagttcttaacctgtgtttataacaactcatgaacttccaaccaacacatcaactccagctccctccagtactccttctttcaaaagggttctagtcaaaggggtttgcaggcattgcttaagctcatggggtgttttcgtcaatgccccattggatttgttcatgtctttgtttctttgatatatcatccttcttctcctacttatcttaattgatctcaaagctcaagtcaaattatatttctcccagttggtaattattttccccttactttaaattctgaaaacgctaatgactgagcttttcatttagtactaactggatggttagttttctttgtgtatgtgatcgtttacgtggtcgttttgtttctcaccaacacattgtaaactcttttagaattgttatctaatagaaatataagtaacataaacctgtattatatttttggagcatctgaaagatttctctcaaatggtctcatctgatccccaaagcacccctctcaggaagtaatttttttatttttatttttggggaacagggttttactctgttactcaggctacaatgtggtggcacaatcacagctcaatcagccttggcctcccaggctcgtgattcacctgcctcagccttcccagtagctaggactataggcacctgccaccacgatgcccagctgtttttgtttgtttgtttgtttgttttttaagtagagacaaagtcttgctatgttgcacagactggtctcaaattcctgagttcaagcagtcctcccttgtcttggcctcccaaagtgctgggattacaggcatgagcaaccatgcccagctgaggaggtataatattatccatagtttcacatgtaaggtaataggagctcacaagggttaaataatttgcatcaaatcactcagctggtaacttttagatccagatttaaaaattctcaacttctgactatatcctatgttttttgtttggttttgtttatagcttgcagttgcttttataattattatttttttgagacggagtcttgctctgtcactaggctggaatgcagtggtgtgatctcagctcactgcaatctctgcctcctgggttgaagtgattctcctacctcagcctcccgagtagctgggactacaggcatgtgccaccacgcccagcaattttttttttttctagtagagatggggtttcaccatgttggccaggatggtcttgatctcttgatctcgtgatctgcccgcctcagcctcccaaagtgctgggattacatgcatgagtccccactggatttgatctttacaaattaatattagcacttgttaactaaaggaatgaagaaataagtgaaagaatgaaggaataaatacataacaacattatgtataacacagatgagtgtaatgattcagcaaaacttcattataatctcttcagggcacctcctggaaacctgagaaataaaactgttttattactggtacttgcctttctcgaaaactgatagtaaacgtcctgacaagttagtcttaggtatctttccttcagttcaatagcaaatgctgtttaaaagcaaatacacagcatttatagaatgtttttgcctcttcattatattttactacataaaaatctaaaacacacaaaaaagtaaaacacaaaaacagtctaaagtgtgacactgatttcagtacaatacatctagagggaataatttttctctaaattcccaggtggctaaaaagagggctctgtggatagatgtggaaagcgtgagacagatgcttctctgagcctcgggtttctcatcttaaaatagagataattacagtacctacctcacaaggttgtggggatttgttgggaggatctaagtaaagcccttaagacactgcctgggtataaagcagctatgtagcttctagtgtcttaacattgctaagaaaagaaacacacttgccccctttttgcagaagtaagctcctttagtgattttcatctcattttcttctatactttttttttatatttgttgtgagcacgatcttctcttttttaataaattcatatttttcaattatttttattattaaggtaagaagtgtgcttttgttggtggaggaagaaggaagcccctacatgcatagcaacgtccatgggaatgaatcactgttcccttcttttctatgaacttaagattatactcaagccactccagaaaatgaccatgcagtcactgtaagcaattcctctaaaattattaaaaactgtttatgtttggagaaaggcagcccctcttgcagtgataatgactgctatatgagaggattaagctgattacatctttggaatactgagattgtgcaaaatagagggaacgatgaactctccacataagctaaggaattcagcaaaaggatgaatcaacaggagagagagaatatgaagcctctatttggaaactgaacacgtagcctcccagataaaagtgagaaagattttgagtaatatctgaagtcatgtagctgagaagttccatctacacttgagaataaaaacaaacaaacatactctaggcgatgtctatgccagttccatgaagtcatcatagacttgcaatcaattgcttgggaaaatagattttaaagttgaatttctggctattactaggataattttttctcctggacattttatgtatttatgtatctactttggtcagggtgacaaatggtatgtggtatgcagagcttaactactactcctagcccccaggccccataatcttttagtggattcagccaagcagaaatgtatgttgaataaaaccatgtccagggggtgagcagaaagaaatgcatttgaggaaaggatattatgtcaatcccaaactcgatgaaatgttctaagagtatcccagagattggttctatgaatctagtgaaacacagaataccctactcttcacagatgggtgtttatttgcatgagtccataggcatgtgagcttttgttccttagctggaggattagagggaagaaatgacataggtgattagggatgggggagagctgggatgaatatggagaaaggttagagaatgcaggcggaagttgatggcagcaatttgacttagaaccttatgggacttgggacacacgcactgtaaccttgagacctagataacagtgttttatacagattcggagaatagattatttctcccacaacccagctactgctatgggtacagctttagtgctctgcgggctcagctgaccacctgaaggtgactggctggcttggagtgacaatagaagagcctatagcacttgtaagagcagggtcctcactgagattgtgcacagcagagggagccatgaactccctgcatgagctaaggaattcagcaaaagcatgaatcagcaggagagagagaatatgaagcctctattcgattaatgaacatgtggcctcccaaacaaaagtgggaaagattttgagtcatagctgaagtcatcatgtagctgggatattctataaacatttgagaataaaaacaagcacagcaaccaatgtcctttctgttctaattaggactaacttttgagtgctagagactagagggcaggcatagccctctatggagatgggccgttcaagttttaataaatgtgttgcatttgtcatcttagtatggcatgacaaatgatctattttatattaggagctgcccaaagatgttgggttaattttagtcaaagtgattttatgcccacaacatctggatgagtttggtcaaaggaaagaagtttagtagactcataaccagaaagatctttgtcttcacctggcctgccagacttctgagggagtaatcatgcccaatatagtaactggaaggacatgccacttgtttggaaggatagaggcatagcctgagaagataaaggtgaaatctctgaaaactttgataaagaggctgggcacggtggctcatacctgtaaacccagcactttgggaggccagggcaggcagatcactaggtcaagagattgagaccatcctggccaacatggtgaaaccccatctctactaaaaatacaaaaattagctgggtgtggtggtgtgtgcctgtagtcccagctactcaggacgctgaggcaggagaatcgcctgaacccgggaggcggaggttgcagtgagcggagattgtgccactgcactccagcctggcgacagagcgagactccatcttaaaaaaaaaacaaaaaaaaaaaaaaccaactttgataaataaaatataactctaactctagatagggaccgaatgggggtataatgtttgtttaagtttttgggagacacttgataacacaacctggatatggtggagagcattcacattccttttcagtagtagcctcttaacgatgaggtatggatgaacagcaaattgctgctgacttattaattaccatgcccacaccactgatttccctatgtcttacctgtgcacacacattggctttacagcatacgaacgccaagtttgtggcgtagcatatggtgctccctcaaataagcacaactgtctgcctctctgcttatctaatcatagcaacagaaaaattgacttttcagttttcttttccccaggccctgggagatgcatatgccaaatacttggcattctttgtaacagagtcaatcataattaggattccaaattaaagtacactgccagccagggcatgtggtattttatattatttgtttgaacaaatgtattataacttgaaaatggcaaagtaaaagaattaagtaaagctcacactttttatatgtaatcatcttgcggagttttattttatcagaatgttagatgaaatcagaaagcaaagaatgtaaaatagaaaaatgtatctgaaactttattcttttaagtaacaggtttggttttttgtttttgttttctttattttcattttgtttggtttttgaaatgctcattgtagaatgttgaatatggtcagatgttgggtgtgaagtttattagaaattaaccctgaaaaagtatggtatagtcattcagttgccttttccagtggagtctgatttggcctggcgggtgtagtgaaacattaactacacccgcctcagccacccaaagtgctgggatcacaggcgtgagccaccgcgccaggccctaaagcacatcttgattgtaggttgagggtgcagtgccaacaaattctactttcatggctcttgaaattctgtgaacatttaagagccactttgacacagccatttcttgttttttgagagagggtattattgaaattctttttaatccaagatttttgtgacaatttcattcattcctactttctttacaccagtagtagctattcatattcattcttctattttctttgcatgattaactggcatatactagttcttcacattattagcctaataatagtagttacaggctataataggctattaattcattatcatctcctgactcaagtgaatctgctggtaactgagagctcctactcttgtcaatggctttgatcccactgatgaccattttagtgctattcccttctcaccatggttgagccttttctacatattcctctcagaatggttgtgccagactttcacggggagccatttttaaagctatcctcactacagaatatggcagcatttcgttggcagtaaaatcagttaaactgcatatagaatgctttagtttcttctgaataaaatgtgttacacaaactgaagtcactgctctttttaaaaaccaaagcagaataaaccgttttgtaagataattttgccactataaatatagtttcctttggcttcttcttggaaagattttatttcagcttgcactgtgagatctttgtcgttttcaccacacatttccgtcaaggaagcccttggatgactgccatgatttgcctctgctggacgcttccttcaagggctgtcaacacctctcttaattgtctggcttaaacatcaggcgagcaatgtgttaaagttagatggcaaatatacttaagacaaatatgtaaatttttactctttcaaatatgcattcaactggtgtgtatagatttcagaacaaaagccagagagagagcaagaaagagggaggagagagaaatctatatgtataaatagaaaagccaaggtagaaatgctgtgtgtgtaaatacccaatttctggattaagacgtatcacaaatacatatgatcaatacttatgtacatgcaagtgtactgcctttccaaacaccagcaaatcttggtgagcagaaatcagtagactgtccatagtgggatctagaatttgaatggaaacggtcttcaattttaaatattcatctgttttcatttgtagatatgacactcactttaagaggtgatctgagttcaaattccctaaattatatttgcatttgacttattacacatattgttagttgtcccttgaattccagtttctctttgagtaagttcttagaagatatatgtagctaggtgacttatagtcacctcttagtcattctcaaatatgattataggctatttcagattcatttcaggaaaatgtcatgtgtcaaggtgtcaattctgagcaatttttacattttgccaattctattatagaagtggctctcacccataagtagcttgaaggagtcagtatgtaatgtgccagtctcattttcactttatgtgggcacaatgtctctctaatgctgaactgttatataacctgtggtctatctgactaccatagcttcgtagatcaaaatattgttatggtcatataaatgactataatgtgggtgttttagaattgcacttttgtttatgcataactggtcccaactcaaatctgcttcatcattttttagtcaaaggatagtttttcatgtcagtagtacctcaaactccgcttgtgaacttaacacccagctatatcctgttagtttttaatcaggagggaaaaaaaggctgctatttgaactaaactgacagcttttgttgatgagctgttaggcagattaaattctgtcttgctcttcaattgttcttgaggctctgtgggacttacagtaatagaattttatttgtgtcagtaaagttgacagccctgattcagaagaccacagggagctgagatgttgattaaggagcatcatattgaccatggcttaagtgggtaacaaatgaactgagagagaagactctggatctacttttgcctgtccatgaactcgtccaaagcaaatatgctttgagttttcatgtctgttttttaatttttgtggatacacagtaggtgtaaatatttgtggggtacatgagatgttttggtataggcaagcaatgcatactaatcacatcatggaagatagatagggtatccatcccctcaagcatttattctttgtgctaacaaacaatccaattatacccttttagttatttaaaaattctattgaggctggacacagtgacttatgcttgtaatctcagcactttgggagggcaaggcaggaggatcccttgagcccaggaattcgagactagcctgggcaacatggcgaaacccaatctctacaaaaaatataaaaattagccaggcatgctgacatgtgcctgcagtcctagctattcgggaggctgacgtaggaggattgcttgagcctgggaggttgaggctacagtgagctgtgatcatgcccctgcaccccagcctgggtgacagagcaaaactctgtctcgaaacaagcaaacaaaaaattgttaaatcattattgactagagccacccattgtgctatcagatactagcccttattcatttactctatttttttttgtactgagattttaatttctgtacttagtaatagctttcaaaattgtcatgttatcccaggaaattgttatttttatccaaggcttattccatttttttttccagttgtttggggcccacaatattgtttcttttagaaataaagttagaaatattcagaataatgaacacttaagagagaataaggagtagaatacctaaaaaaaaaaaaaaaaaaaggaatcaaataaggaagagatagatagtaaaagagaagtggatgtaagcaatttagaatatattttatcaaaaattgctttttaagtggcattttctcttgctgcagaagacattattgaacaaaaaaaaagcccaatgcaattcaatttaaatttatcactctattattttaatatatttactcagggttaacaactcattaaacaccaaattgctcactcttaatgagtctctgacgctaaaattgagctgacttaaattttactgtaaaatatcagcaccattgcataaaactgtaataaaaattaactaaaagctattgaatgactgtggagtggaaaacagatttgtgacacaaaacagaaaatgtagcacacgatatgtggctggcagaaacatgagtaatagcttttattcaccaaaacatgataagcccatttttcttttgctgtattggagtctgtgaaacatgaagtcatgttttctttttttcccccattactttgtacaacgagggccagtggtggaatgatacagtttggctgtgtccccactgaaatctcatcttgaattgtaactcccacaattcccacatgtcgtgggaggaacccagtgggaggtaattgaattatgtgggcaggtctttcccatgctgttctcataatattgaataagtctcagaaagtctgatggttttaaaaatgtgagtttccctgcacaagctctctctctttgcctgctgccatccatgtaaaatgtgctgctccaccttgccttccaccatgattgtgaggcctccccagcgatgtggaactgtaagtccattaaacctttctttcttttgttaaaaaaaaaaaaaaaaaaaaaagattatgatagtgctagtcaatactgagttgactgtcaaaaataagcacactttacattagccagttacttctgggacactgttgaagagtatgtcacatgtacccacaaattagtcaaacatctttaggcatcacatgatatctaaattagtctttttctccttctccatcccctggttgtccatgaaatattggcctcaaatcagcttgcctatggccaccatggaaaccatccatcatgaacagcacctatgcccctggtacaggagtgcatttctccccaagcctacagtcttctgtgtgtcacagcaatgctgagtttcccacagaggtggcgttgatggactctttctcaactctttgctatggagtatcacctgggctaagaagttctgcttttgcatcaaatttcaatttttttctttttattggatttgaattgttctggcacttttgccactatgctgtctctcaagccctaccatcccctccatctttctaaggtctctcagaaccttagctccaacaaaacccccttctttttctctcattataacacaaatttcctgtgaatatcaatgaagcaaacagatacagtgggagctcgtgaaagacaaaggacaccgagctagtattttcattaacaacatgggctcttgtactgtcaaccaacaagagctttgttataaatttattcacaatggcaatggctttgggcaacatttagatggaaagtatttatgaaaaatatactatttatgtttctggataggaaacatactattcatgtaacaaaatatgacatttaaaggaactcactttttcttttttgttgacagtcaccgtgtcatcaaggaaatcaacatttagaaattatgattgtcactagctcactctgagccatggctctacattttatccttgtcaataagcaatccagtgttaggattttaaaaattgtttaaaatatccgtacaaagagttattttctatcttggtccacaaatttgtcaatattttccacagcatcacaattgtcagaaaacacagtgaagcttaagttaaaacaaatctgcaaagaaaaagtcaaaaagaaaactcttccacagattttcagagagatgatttattagtccaaatttgagcattgaaactagcctatattctaagtttaagaaaactgtaattttcatgtttctttcagttcaatacaatttatatattgaatacaaaagagattttcacttattgatatggctttctaggtgtttaaattctaactcaatattttaaggattcagtaatagtagggtttccatttctacatggtaggcattctctagtttacttttcctcttctttctgtagaaattaactatttttgcttcacagtcatttcatgatagacccgatttcttacactgaaattcattttaatgtttggattgagcaatggtttgctttggtcttaacttttatttattgaggtataacttacatacaatgaaaatctcaaatcttacatctactgttcaatgagttttgacaaatgcataccattgtggactccatccacatccctataacaaagcagggaactttttcaccttttcagtaccctgtaaaagttacctcatgcccaattctccccttcctctaagcaaccactgatctgatttctatcaccatagtttactttttcatgttctagaattttataaaaatgaaatgatatattgtatccttttcttgtctggcttctttcactcagcatactgtttctgagactcagcggattgctttttaataatataattacaactgagtctcaaagatttgaaaaagtcagaatttcttataaaattggacattgtggtttgctacctgctgaatgatgaagacgaataatgtacttcagtgccctgagatagtttttgtctactgtaataaaatatttccagtcttctctgtttttgcattcttcaattattaccttgaagttttaatgttttttaaaataatgaattggcctaattgtagcctcagcacaactactaagttacacattcaataaaaagactttttctttgtaatgttatatgttaatggtcagcctcctagatactgatgaagcccatcaatttctactgatagttaagatcaattaaccaattagttacccattttcatttttcctgtatattctttgtagatcacttactaaaatgattttctaagaccttcactttcttaagtaaagaaaaacaatttgactgagacttggccatttagctaaaatctaaaagacctatttaatttaaagtataagtcaagcagagatcttatcttctgtccataaataataagaatgattgtttttcgctaagtggaaaaagtgagatgaggcaagaagttgaagaatgcctagccaggtagcatatgaagcctacaagtttccagctgtgggtctgatgaaaaataatgagacatctgatggaacttaggatcttatttgaaaaataagccatcaagtactttaactttctggtatttcaaaagtaaaaacatatactaatcacttgtttttatttcacttatttgacactacacatctgtcttagtacaaactcatgtttatgcaatgagatttattagactgatagttcatatcttagccccttttcatagagaatcattgaaaaaaaaactgttcactgtgagaaaactctctcccctcactactgatcgcttatagtaccaattcagtatatgagaagacactatttttacaattattcacatccttaagaaaataaaactctataatttaaacaatgggagtataaaggtattttagaacgtatttgtatatgttaaaacaacagcatattaaaaatttaccttgagaaggccgggtgtggtggctcacacctgtaatcccagcactttgggaggccgaggcgtgcggatcaccaggtcaggagatcgagaccatcctggctaacacggtgaagccctgtctctactaaaaatacaaaaaaattagccgggcgtggtggcgggcgcctgtagtcccaggtactcgggaggctgaggcgggagaatggcgtgaacccgggaggcagagcttgcagtgagccaagatggcgccactgcactccagcctgcactacggagcgagactccgtctcaaaaaaaaaaaaaaaaaaaaaattaccttgagaaaaacaagcaaacacatgaacctaaaaaggcaacagcagatatagtgttgattgatccactgccactccagaattatttatggtagcaaaaataataattttcaatttgatggattcttatttaagcagactcattatactttttggaaaataaaatattaacattcaatataatatgactacctcagtcactttagctccacaggtgattgggatagcgctgctggcctgaataataaaatggtaataacctcagttagaacaaataattgttttactagttcagatacacttaacattataatagatgccctcataaggtgctatgtataaatcctttttttgaaaaaaagcttgaatcatcatgtaaatgttttagggcaactcattgcttagagaaatcctttgaagttttcttttataatgcaaaaactcctactgccttatctgttttgtaaattaggttgtattcgtaccagttttgttgaaaagtgaaacatccttctaagcatgaaagttttagaaataatgtctaagtatatctaaagtagctattataggacataaatgcattgatattttagtggatctcagtctagaggtgagaagagggctaatcataataattgggactgagtgtgttagaattacacatctttcccctgctctgataaaaaatatcctgccatagagagtcactgatactaatcagagcatgtcatatctttcagatatttggggacagagaaaaaaaggtgatgaattacagtactagagatactatagcctttaaaataaatattatatacttttggttctacatacttttaaatgaagatggtccatgaagtaagttatgatcaaaactaatgcaagggcttacagcctaagaagaaagtccagaatttagagaatggtgacctgtcttttcttggcaactaatattatgaacatcaatttctcatcactttgtggcttcaagaaattctcccatcatagagatgaatcacctttcttccaggtcttcaaaaaaaaatatatatatataaaggtctgtgggagataagcttagaaacagtggctgaaaaggagaaaaattcagatttcagtcctcgggggtttgcataacaaatgatgaagtatagttttatagctcatctaagtaccttggtgcttcttttgggtacaagtccctgtttattagacaggcatggtgacttctagatacattcttccaagacatcaagataattttacttcttagttttttcacatgttaggcaattccaagattaatcgtgtataaacttgtttgacacttgaatcaatttttggttttacataaacggcattatttcatgcatacctcagctgaaaattggcagttatgtattagtgcttgattttctagaccagtattaaaattaccttccaaaaatgtttcagttgcagaaagtattggtggccaacaggtcttccatgagtcgggacacattagccagtgtcaccctttctctagccagtcagttctatgagaatggtattggaagaacagacaacctacctgcagcacttgccctgtcctgttcatattgtggacaatcatcaaaagataaaagggcatatgaaagatttatggtaaatgtcttccattttctctgccttgagtacactggagttagctttcattttcatagttgcttactatgaatgtcttagatgtagcatgagaaaatcttatattttctttttgtctagaactctgctgttcaatatagtagtcactagctattacataattaaaatatggctagtatgaataagcagataattttaattcttatttcagtataatttccatttaaatttaaaaactcaagcagtgtaaaatagttttcatcaaacacaatttttgttctaataaaactatatttcacctaaagcactgaaaatttagcattgagtttcagtgtgctgttaagtataaaaatatactagattgtaaaaacttcatatcacgatataaattatctccaacaatttttatatacattagatgttgaaataatattttgattatattgggctacacaaaatacattattacaattaatttaacatttctttgtacagtttttaaatgtgaatccttggaaattcgtaattgcatatgtggttcacattatgtttctcttggacagtgctgagctagtacattctgaaatatgtagcaattatttctctatggcttcataaagaaaatgtcaatccaaggctgaggatttatttatgaaaatctaaagacagccggttttcctgatggttcatgccgtgggggaacgggtctctttcccaatatataagaggacaaatcttgggatgggttttttttttttttggtcttttatgacattctttaatgatttctcctgtgcttgccattctgccttgtacgtaatacaccctttctagcaatgggtttaaaggtttttccttcctctcctttttgagctgtaaaatatgcattatggggagaggtgagctgatagttgagaaaggtcattaagggttcagcctggcttagtcggaaagatgtgaattcaaattgttattctcccagatatatactaacatgaccttggggaaattgcttaacttttctaaattttagtttgcttcatctgaaaaaggtacctaatagggaagttttagatattaaaatcaatgaaatttaaaagaatcaagaaatatgataatgcctagtatataacaggccctcaaatgtgttctgaaccaagagatccctgtaagagttaaagaaacaggaaagaaacacgaaaagcggctcaacagtcaaagacaggttaattttgcagaataaacctgagaggggcttctggccaatttttggacaggagcactctctcttacagactaagagtatttattggttttagggcgagagagctttatcacaggcttggaatgtttctgtgtgggggagaaatttatggtggggttggaatgtctctgtttggaagggaagttatcctggggctgacctgtctctggtcggggaggggtttatcttatggttggaatgtttctggactgggatgttatttgtggtttatggtcatgctgacgttagccattaagctgatgccctttggatttaggcagtttttgatcaaggggaactttagaatggtggtgcttgtccaagatagccatgctcccgctgtgtcaatccccaagttttaaatgtgtatctttacttagtgacttatggagtcgtaactattaggacacatacagcagtaagtctaaggcatataccagcttatcagatggatcccctacctggcaaagggaagatcctctttctctactaccttagtccttctttttatactctgtgcagcttttcagttcttccacttgcattaaaattagattacctcttagattagatcaaaagattgtccctggttgtgagaagaaagaatactttaatctagcactaatcccttaatacaccattatatttgggtacattttttttcctagcagaaaaattatttttcagccttctcagaagtactaaaagtcctttgccaacatcagcccagtgcaagttaacctgttatgagatttgttttgtgctttggaaatgcttgtcagacaagctttcaacattgagatgtgtgatttaaattagtttgcataagaaaatgtaatgccagggacaaatttctctctttatcccttcttatactacaaaacagacaaagagggttaggtggttgctttttagtatgcgagtaatcacttgggattcacagaaatattagatgcagtgttattagtgaaaccttagttccctttatagatatgtcttatgtcccatttgtaatattattattgttgttaccatacgcaaactttatttcttagtttggatgcttggtctcaaccagacccattacctccttatcttcctatctcttagggtcacttcatgcttagaggcaacttgttgaaagtggaggtcagcgtgatcctttttcttagaagacatagccctttcatggaacttacgtagctgattcatagcctgagtcagtctcttggatctgtgaaaaaaaggaaaaatgaaccagacatggtgtttgcagtcagtcttctttgaatataaaatatataggcagaggaaaaaattaaaccaggcagattaacctcaaggcataaagacaaatgctaaaatgtactctaacgtgaagggttaagcattccaagatgcccgttggaaggttctttatccaacacttctctacccattccaaccccagtgtaaacattaaataattcttttaaaatttgaatactcaaacaagaaagtaaagcatggaagataatttttaaatcattatgtagtgattagaggaagaggaataaagggtaatgtgagattttagaaataggtgctttgaatagataaagagatattgcaaggatagatgaactcactatcgtctttgcagtatagtatcgttggtgcagaggatttgggatagaaatccagtctgggggccgagatgtgatcattatgtgcaatatcatcttcaaaaagtcaggtcatggttatcagtttgctacaaagaacatcttagtctcatttcctgtccaaggcaggaattttcccctgaacattcctgacagaagataacctgttttgtgctctaatcacccagtcttctaccagaggttgaagtgacattttggctccattttctcgtattttatgcaagaagctgggaattccagcatcttactctgctcatcagggatcctgagggagctggtaatatgcagaaaggatgtcaaagggccatgttactaatagctgtggaagctccgctatccacaaagcagagattatgaaacagtctatactttggctagaagcctaagcagaatctcttctacttccctcaaaatctatttcttagcaccagcaagactgggtctgtccagtgggttgtgggtttggggagaagcagaggaaagattgacatcatgtggaatctggaagagacagaacacatctcttggtgcttttgaaggtacagtgactccatctagtagtaaaaggtgttcaaatgaatggcttcaaatttgaccagattatcaaatgctgcttccctgataaacagctcagacatgggttagaagaggtggccctgggatgggaagcagtgcagactctcatgtatgaatagctccaattctcaaaaaattcttttagttaactgctgtctgtcttcttctacattgcactcaagcttaactctgcacttttaaaatcaacatataaattataactttctctcctatgataacttttcaaatgttttttgacatctattcagtaccgagctcccttttgaaaactgggccatcatttcccaacctccaatttctgactgtatttccataatttatttaaagactcctaacaatggagccacaatcataactacaggtcccctttatatctcaggatgacattcatttggttctaatccttgaactcatttgaagattctaattgctcttgtattctctcctcttctatctggaacttatctccctgataagcatctgtgttgtgattcttctagagtggagattatttctcttgtaaggaaaaaaattaaaactaccttgttctactttctctgttgcatcacaccttctctcttaagtaatagtcctaaaccttctctgttcttctccagacagatcataaatgttacaccccaacctaaaacaaaacaaaacaaaaccttccttcatgaattattattggccttgtatgcaagactgagttgatcccagtctcaatttacctgataccatctatttcaacaataacaataataacaacaataatgaatatttatttagagctttctctgttccaagcactgttctgaccactttatgtatatttacttggttgactctaacaataattactgaggtgggccaggcacagtggctcatgcctgtaatcccagcactttgggaggctgaggcgggcagatcacctgaggtcaggagttcaagaccggcctggccaacatggcgaaaccctgtctctaccaaaaatacaaaaattagccgggtgtggtggtacacgcctgtaatcccagctgtccagaaggctgaggcaggggaatctcttgaacccaggaggcggaggttgcagtgagctgagattgcatcactgcactccagcctaggcaacagagtgagaatctgtctcaaaaaattaaataaataagtaaataaaaataaataattactgaggtggctattactaatttctctattttggtgatttggaaactgaacttagaagttaaagggcttgagcaaatacattggactaaaaggtggaggagctgaggtttgaagtttcaatgcaggcatctggctccagggttcatggtcttttaccatgatgccatgctgctatgtctacttataggagtatgcacgcttttatgttctttcctgtttttgtgagccttattctagcttttatatatttttaaactctgagctccttagagagtttccaatggccagtcaaatttatttaggtcctctgaatagtctctgaatggaagaaagtgtttttcatccctaaagcccacatgtatacttcagatgcacaaggttcaaggtcagggcctgaaggagaaagtatcacagcacaagtaacaatgttaaacttcaaaggaagataaaacctcaaaataagatattaaggtcaaatactagaatctgcagggacactgtcctggttaagaggcaatagaaaggaagtagcataaggtgattcagcaggggagagatgtgagaccaacagcgttagatcagtggggctgtaagagagactctccaaattcatttatggaggagaatgccagaagagtggggagagagtgagctagagattcccaagtcccctggcaacgcgaaataccaggggtactagcacccaggtctttgcttctaatgccattctctaatgaaagggacaaggcatccttggaaaaatggctaattctagcacagagcagggaatagacaagatgagcccggagaatctggtagtgacagaaaggaagaaaatgcagaaagaaaaaggaaggaagacaagggaagggaagggatggtatgaaaggaaggaagaaagggaaggaaggaaggaagtccaatgaatgggattggggtctatttctatctgtgttcttaacaatcttcttcatcagggattagattcttgtttttttctttgttgccttttttttttttttttttttttgagatggagtctcactctgtcaccacgctggagtgcagtggcgcaatcttggctcactgcaacctccgactccgtggttcaagcgattctcctgcctcagcctcctgaaagctgagatcacaggtacacgccaccacgcccaactaatttttgtatttttagtagagacggggtttcaccatgttggccagaatggtctccatctcctggcctcgtgatctgcctacctaggcttcccaaagtgctgggattacaggcaggagccaccgtgcccagcctgttgccttgtttctgatgggagtccaagaatctccaagctatctatatgagaaagacaaaactactctttctatcctgtactgtaatcctacctgacaaatatatccttcatgctccttgtcattttgagcaaatagcctgagcttacctcactttcatttgaacttcctccctctttattgccaaggtactacgttcctttatctctgtgcctgaacaagccccccttgctataatcttcatgctgacccctcattctctagagtatatgctgttttctgcagcagactacacggccagtgcccttgcttggagcagatctagacatcatatcgccacggtcttcattctgaagtaaccttagaagtcactttcagttcataacattaaagcacaggttacaactcatatgactacatgggccatataaaataaatgagtcaatgtgccgaagatcaggaaagtgatagctcaggcaagactgacactaattcttggcctctctgtctaagagacagaagagagtgctagagactatggcacccaggagaacccagaccgaagagggcagccactgctcagctgctgccagtcatcacagcacaggagcaatggaccaatattatgaatttatcttcttttgaaagacaatccagaagtcgagacttttataaaaagtctgaattcattacctgtattaaattttctttgatttaaaacactgatcaggctaaatacaacatacctgtaagatattacatacctactgcaagaaccctgcctctgcatataaaggagaaagataagcacagttgattctcttcacaagccctgtgtcatgcaaacaggattaatagcccagttctaggctaacaatttcatagcaaccatgtggttattatgtgttgtatatatgaaattatgccataatgagctgtctcctaacaagattgtgcaggctataaagctgttttatagctccaagagagttgctcctgagttcattgacagtgcttattgtttctttccatctcagttacttttgaattaaaaagtgctcaccctactctttcttctcggctacaagttttgccatagtgcacagtgtttcttcatcttactttctttaaagaacctttcccatctcttcagttatttctacctgttccaacctccctcctgatagcaccccagtagtgggatggaatgtgctggaggggtttggccagttcttgggggagtttcacagtcacctgtctacagtttcagtgagatgggaatttatcaagctgaaattagcaaaagacaaaactgacattgtttaaacacatacttaacaaaagatctaaccagttcctcctagaactagaagatatttgaaaattagagaggagcttttttttttttcctatcgctttctttaaaacacacttttccatagataatcttatctttttggcatcaacaattatttataattctggaatgatttccaaatctaacttgtaaccatatttccaactacctgccaagtgtctgtgctggaattacctaatggcatttgatcgtggctcaaatgtgctcactcaactttattccgtgggctgctcacctcccctgtgtggagcctgggagcctctgaaggcaaatcttgactcatctctcacctctcaactgatcaaccagtagccacacctgacttaaatgccatctggaatccagttctctttcagctcttccatttcttacaggaacttttacagtaacttctgaactgttactcttgcctctgaactgcctcctttccaatttattattcacaagttccctggagttattttctttaaaacaaaatgacagctttgtttcgttaaaagactgtcaggttactccattccattggccagagggaaagggacaaagcaagtacgtgcccacacaatctctttactgtggtatttggtagctaatacatctttcaagcctcatctacttcatcgcctcctgcaccccaagctggaattacatgtgtcttattgccctgtccctgcatatcttctggccttatagacctctgtgcctttatctatgtcgttccttctacctcaacaggtttctgtcctaccatggattgtctaatgccttctgcacatgttctttatcctaggaagcaaaatatttattccttttcctgcattctttaatacctagtttatgcatgtctcattgcacttattctaatcggagcttgttcttgtcattttttttcatatttttttccttttgtgggggagtttaggacccaagtctttgtcctcttttggtttaactagtaccttgcacagaaaaggtagtcaataaatgtttgaaaaaaaaaatcccagtttgataattagttgaaaatttcttcagttaatgaaaacttggtacaaccaaaggaaaatgaattatcagagtttactatgctccatgagattcttttcatacaagtatgctgcagaggaatggaagagtgggaatataaataaatatgaaaaattcttagaacaatcttcttattatttgagacagagtccagctctgtcacccaggctggaatgcagtggcatgctgttggctcactgcaaactccacctcccaggttcaagcgattctcctgcctcagcctcccgagtggctggaattacaggtccccaccaccacgcccagataaatttttttttgtatttttagtagagacggggtttcactgtgttggccaggctggtcttaaactcctgacttcatgatctgcccgcctcggcctcccaaggtgctgggattacaagtgtgagccaccgcgccctgccagaacaatcctattttctaattggggtttttctttgttttttgtttctttgtttgtttgtttgagatggagtttcactctgtcaccgaggctggagtgcagtggtgtgatctcagctcactacaaactctgcctcctgggttcaagcaattctcatgccttagcctcccgagtagctggggctacaggcgcctgccaccatgcccagctaatttttgtatttttagtagggacgaggtttcaccatgttggccaggctggtcttgaactcctgacctcaggtgatccacccgccttggcctccaaaagcggtaggattacaggcatgagccactgctcccggactttttttttttttaatccttctactttactcatactctccaaagttaattcacacacaacctccccaataaaatggaagtgaggtttaaaatcagaccataatttaaccagctgaccaaatgccattttgtataagaagataaaaagctaccattgttgttatatctcagagcagaagctctttcttcattttattctttaaaaacatcattcagggttgggtgtggcggctcatgcctataatcccagcactttgggaggctgaggcgggcggatcacttgaggtcaggagtttgagaccagcctggccaacatggtgaaaatctgtctccactaaaaatataaaaattagctgggcatggtggtgggtacatgtaatcccagctactcaagaggctgaggcaggagaatcgcttgaacccaggaggtggaggctgcagtgagccgagatcaagccactacactctagcctgggcgacagagtgagactccatctcaaaaaaattttaaaaataataagtaaaaaataaaaacaccattcaatttatagttagcatgaagctacaccatcaatctttcctcgtgttcatgatcatggctcagcatttttctgaagtgtcattaataagccatgttagcaggaatgacctacacatatgcatgtcaggagggcttcaggccactgctgtctgtgtgtcaccttgacgtcagccttgataattgtccagggcctccaacttcacagcagtacctgggcctatgtcaggttgagttctatgatcacacactattttcatcagaaattttaataaaattatttttttctcagatgacttcccgcatactactaagtgatctgggagaaggagtcttagggtgtggatgggattctgccttgggcatattttgctctactgggccctggagtctttgcagatgctgtcaagatactgcacttttttttcttttttgagacagagtcttgctctgtcacccaggctggaatgcagtggcatgatgtcagctcactgcaacctccgcctcccaggttcaagcaattctcctgcctcagcctcccgagtagctgggactacaggtgtgcgccaccacgcccagctaatttttttgtatttttagtagagacagggtttcaccatgttggcccggctgctcttgaactcctgacctcaggtgatctgcctacctcggcctcccaaagtgctgggattataggcatgaaccactgcgcctggccgatactgcagttttgatggccatcactggtacaacaccctgcgtatgccaagactgtcatgccttgtcagctataataaaaagcaggagacaaatggccttttgttacctgaaatgatggatcagtatgtatgtgcaaggatgcacgctgtcaagttcttgtgggttaatcatgccaggctgatggaggggctccacgagttccaaagtagaaggagcttgaactccaggctgtggctttgaagcagttgttttctctggaattagctaatgaggctctctttgtttgaggattggaaagcctccaaaaacccactcaggagggaaattaacaaatgtctgttttgttacctccggataaatcttcatgatgaaatgtgcagccggtccacctcttcaatcttctctcttcttcttcctcagtggaagctcaattaccatgaaggccaaaataaataaataaataaacaacaaaccaaccaaataaataaataaagcagataaaccgtggttctttgcttaaaaaaagttgcagcaaagaaaagctttagagtaatttctagttagaagtggctgtgagattcactgtcttctggtgatatttgaaatatactatattcatgcaaatgtttctgattatttaaacacattatctgtatctataattatcagtagctgctggcattatgtgagcatgcaaaagtgggaacagcagcagtaacctgactcatttcaaccaggatggaccatctcagagggtcacagttactaatctctgcatgaactagattttataaggtattatgattctttcatagcttgtaacttttcattgatcatcaactttactgatttttgttaatactggaaattttaataaatgggttgtgcacaggtacttattgagcatctattacgtgccatagaatattctgattattaaggatgtcaaggtatataatccagagtcacggttttcaaggaactcagtcaataattacaagctaatacatgggtaccactgttctaggcacagcgtggcagaaaagaatagcgtggacacacattcaggggatttaactaggagaaaacagtaaggaaggggatcttagcagaggtagtatattaacagatgtatatgacaacttacactgctgtaagtcatcctgtttggctggcaagttttgctttagaaactgggtaaatattgttcatgaaacttctgtgtaagtttcacgtgaatgttttcctatgtgtatgtgtgcatgcttatttgcatttgtgtgcacttgtgggtatgtgtatttgtcctgtgtcacaataaaaggtatctatttctggactttgcagtcaaaaacattggaaaactgtctatgtaggtaatggacacaatagaatttagaaagcaacttttacaaacattgcagatttgtaattttctaatatcattgatatataaagctgagtataccagacacttgtaaagaaatgatcttttccaatgaaaacacaggtgttaaacagaacctttcttctggcctacaaatcactcttctaacacttggaaaaaattaaagaaatattcagcaatgtgtagaatttcaatcccagagagacaggaagagactgtatagctgcagatgcaatatgcttgttattttggcaaaagcgtaacataagaagccaccaactctcacagaggaagcagagaaattcagtatttgcttgtaacttagatatttctttctttgttttccccctaagaagaacatatcttttctggtgggaaaagggaatttagataattaaagcagagggaataaacattttcaggaccaaagagaaaatagccgtttgagccacatatttaaatgttaatctacaatttttttttttttttttgagacaggatttcactgtgttgcccaggctggagtgcagtggtgcagtcttggctcactgtaacctcccttctcccctcttgggctcaagccaacctcccaccttagcctcctgagtagctggaactacaggcatgtgccaccatgcccggctaattttttgtcaagacggggtctcactatgttgcccaggctggtctagaactcctagactgaagtgatccaccagcctcagtctcccaaaagtgctgggattacagatgtgagccaccaccgtgcctggccatcaaatgtttttcatagtggactagggctttatgatcccataaaaattatttccctcatggaaccactccatttatgtattataaagctgtcaacatctggttttattgataaatatccctggggtttttgagctttttcttttcaacatagtgcctgtgttttatcttgacctttgctttaaaattactgctagatgtaatgaggattctggaaagagcatggttcaagattttgtacaattgatataatgattctgaagcaaataatgggaaaggggagagtttcagaatttggtggccttagggtaagcttatgatttgttttatctttcctcatatctacctaatgctgtgaaattttgggattagatttggattggggacaaatgaggagtggaaatagtggagggagaaagggttaggaaagttacagaacttggcaaggctcttggaggtggtggattgatttctctggtgttgtgaagtgtcatcttctttcttcagttaaactgaagtacaggcaagcttctcctgctgcccctcagtttcactgtgtcaccatttttagtagggataagcagagacttgttgttggtaaggacaggaaggaaggtgatgctgatgaatttttgctggtgctaggttagctgccagccggcctggcaatggctgtggtccagccagcctggggcgcttctagtattctctgtcatggggcaatatgttaacgaattaaaatgccaaatagaaatgagacagaattccaaagacatgtaaactgaaaaacacctgtccccatttgttgattttttttttcctgcatatacttaaaaaaccccaaacctttatgtaagagtctcaggagtgcagtgaaaaaaaagtgtttattgacgagccatttccaatttaggccttaaacttcaagacccatttctaagacccatatgcttcaaaacgttctatataattcagctcaaaaggatcttcctctcctctagatctataatgtttattgactacatccctcaaagagcagtaatgcatcatggtgaaataaaaattgaactgcaaatccgaagacttgaattctagttcctgatcgtttttcatagtgtatttaatcacacagtttaacccctaggtctccttcactgtgactcattatggtgagttcgcgtgagaaagtgtccaccataggacactaaattcaaaagagtgaccagtaatgattgttgtcccaaggatgtccaaatgggaaaaccattatcagtctacactctaaaccagaagggacttattccaccaaaagaggttaagggctccttaccacagtcacaaaaccagaatatatattctttcagagaaaacccggatacagggcatgagattagaaccctagaatggcatatcaaaaacttctggagtctgttgagtagaagtttggagaataaacaaattgatagattgatatttgaatccccggcagagtaagaggaataataagattttgaatcaagaagaggaattctgccacatgcaactaggaagaaaaaagcaaattaactgtgataacactcattagggattatcattatatctttaatgaggaggtaataaagactgattatttactaggcatcccttattgatccctatttatcactacgtagagtaaaatgtacaatttttcctttcacttgtggatttcattaatttatacagtcatcacatattgattgtacatatactgtataccagacactttattagctttaagaataccaaaacgaatatgccagatatagtatctaacttcatggagtttgtagagagattttttgaactgaatttctcagcaaactaacacaagaacagaaaaccaaacaccatgtggtctcactcataagtgggagttgaacaatgagaaaacatggacacagagaggggaacatcacacactggggcctgtctgggggtaggaggttgggggagggatagcattaggagaaattcctaatgtagattacgggttgatgggtgcagcaaaccaccatggtacttgtatacctaggtaacaaacctgcacgttctgtacatgtatcccagaacttaaagtataaaaatgagaaaaaaagatgcacaaatagtgtcacatatagtataataatgatatggatatggcctaattcatagagtcaacattctgatactaagaggaaggaaaaatcaaaacaaaataaagaaaaaacaaagcagacagtagcctttaaccgtttccttttaaagaaacattgttatctgggttcattacttgttagaaagtaatgtgaagcacttaataaacttcaggtggtggtattaggtaattaacatgtgaaattcctcatatggttatttaaatttcatggtagtatttaacagttttcatgtttatggccttttcctgcaactaagttgtaaaatccttaagggaaaggatgaggaaaggaagacaagagagaaactagcatttgttgactggctactacgtgccagccacagcactagctactaaacctgtgtcactttatttaaatatgaaggtcagaaagcatttctcatgttcctggtatctcctgcactgcctagtataatatttcatacttacaggtgcttcatcaatatttgtgttggttgacttagcaatttaaactgcttctaaatagagttacgtgagtttttccccaaagactcatgcccttttttaggaggcaaactagccctttccatgtcaccttccttaagaagcagggcaaagaggtgacagtttttatactgaaatcagttgtttaattgttcacccatttatcaaagcctctgtagagttaaagacaagtacagtgcccatgtaccctttatgctgcaagttctggacagatagctgtcaatgcctgaaaatagtgtaaattcactgggtgaagagagcaacttgccagggggatgtgatgtagccccttctagagtatggggttttctacttgggcatagtcagctgctagtttgttggattgctgctgctggggaaagaccaggccacttcatgatggaatgcgtcaacttttggaaagtcaaattcaggatgcagtttcaactagtagtaactatatttttctatcttttaaaaagtgaaggagcaacagaccagtctagacacatggacgggctttagggctcagttgctaaagagatagaagtaaaatattatagaaaatgcttatagtacatgttaagtgagaaaggtaaggtaaaaatggtttatgacctataactgtgtgaaaactaaccaaagagacacgtatcatttaaaaagatttaatgttgtgcctgtaatcccagcactttgggaggccaaggcgggcggatcacaaggtcaggagatcaagaccatcctggctaacacggtgaaaccccgtctccactaaaaatacaaaaaattagccgggcatggttggggggtgcctgtagtcccagctacctgggagactgaggcaggagaatggcatgaacctgggaggcggagcttgcagtgagctgagatcatgccactgcactccagcctgggcgacagagcgagactccgtgtcaaaaatgaaagatttaatgttggtcaaattatacacaacgattcaacagtactggaagttgaggaggacgagcaagccagatagcaccaatgatcatgaataaattccttatctttcagaaagcattattgttcagtggtttcaagttttggatgtgcactcacattgcctgtatggaatcctggctccacaagtagttgtgtgagattgggaaagttgcacttgtttaatctgtaaaatggaaaatatctgaggattaaattaaaatatagctggatcatgcatagcataatacttggaatatactaagtcatgaataaatagtactgttgtcatttctttgacattaattattaaggcaattaggaaattttccatctagttaacatatagcaaatcaaactaagctgtgaaaaatatataatatgctatggtaataagacactgaactgtgatgctattattggggtctgtctaaatccacagaagcatcagaaattcacataaatcaatgctaatgtcaatgcctagtaaattatagtctcagaaacatgaagattctagatgttttccccttctttgcacactttgtttatatttcaccctattactattatcacctatatttatggtttttcaatcatttgtgagtgcttggaggaaattcattggttcagcagttgaaccagggtattgaatagtacatgaggactctcagactctgaagagctggtcgggtgtctctggctaacacatttccagtggataaagagctgctccagggacatctccttcctctgcagtacagtgatctttttgctggtgactagaaagtccaggggaaaggacagccagccaaagggtggcaaactgatggaaagtgggggcaagctttctgtaaccatgtaaaagaaactgccaattcccatgaaaatccattgtctctttttcttattaacaaatccccaacaagccaccatggctcaagcctgtaatcacagcattttaggaggctgaagcaagagaattgcttggggccgggagtttgagaccatcctgggcaacacagtgaggcatgcatctctacataaaaattttacaattagtctagtgtggtggcacatgcctgtagtcccagctactcaggaggctgaggtggatcgcttgagccaggagttcaaggctgcagtgaactaggatcaagccactgcactgcagcctaactgacagagcaaaatcctgtctctaaaataataataattttaaaataaaaataaaatgctaaaatgaaccaaatctccaattttatttgaaataacactgccttagttttttaagaaagaaaataaaacatttctcaccttttctaacagtcaagctggtatgttgctttaagtttggtgagtgtcaggtatgcaaaagtgttgagtggcagatacagaaagactgcttaaaggcatctgactcagttgcaaaggacatcctttgtccttcttgctgcctgtactatgaatgtagtggttggatcttcagaagcctatttaatcataaggtaatcttaaagatggaagttatgattaagaatgccagaacacaaagataaaaaatatagaagtctcagatgaaatttctgaatcagccttaaactataatgcttaaactgtttaaatgtgaagggataaaatttggggcatttatgccactattttatgttatcgttgttacagtgagtacaatttttaattggtatgtgtgtaagatttgctcagatctcaatcaatggttctaagaggaaaaagcttaattccaagctgcctctctcctgtctatgatatcccaagcatcacaaagtacacttccagctcctcagaccctgtccttgttttgcattgtttagccaaaccacttcttaacttcaagtagcaaatagataactcacattagcattaggttctcttattacaagtaattgacaagaattgtaccagtgattaggtgttgcccaaagatcttttaaaattccatgtgacccaaatactaccaaatcctaaaagatttaactaactggctcactaaccaatgcacacacatacttacttatttcacccagtatgtgttgactaccttttgcccaccaggagctaggcaggttcacagtgcctagctcccaggcacaaagataaatcagaaaccattctgtctaagtcaacctttcattttagcttagcaggaaacacactaaaccacggctgaaatatgccaggaagttggtagctggtgatgcctctaccacaccgcagtgcggttaatccagcattcgacttagtcgaaatcacttttttcttccaatactggcatttttatggatggatggatggatagatgaatatcagtatcaaaaggtccatgctttattttctaataacaattcatgtccaattatctgactgccagcacagttatctgctatggttgttagaaactttagaaagaagtaaatcctccaaaattgtcactcttaaaatctgagagaaaacagaatgaatagataagagatgcttcaaggcagttcagctctgtgatggttccgttgagatagaacacacatatacaaagtgtttgaagtaagaatttccttcgaggagaagcacaaagggaatagaagacccagcatttgttactggccttagataagcttactgttcacttatttatcaatgtaaaaacgcccagttagtttttagctcaaggaagagaggacatggccaaagatggccttcatgaacttttttttttcctgtgtgaagtatggaaactcattttcagtattggattttgactggattgtcttctacccagaagctggctctgcagaagttatgatcagatctttggaagtaacatttgatctaccgccgaatatagatccccttccttccctcttctactccctccttgcttttccttcttattacactgatttcatgcaaaattaattatcagtcctgtcacatcttgcactgctaacagtggtcagtattgaattatggggaacgtgaacagaattttcagcagcctaattgcttctcctgtgcccagcaaaatgttacgttaaatactcacagcaagtagactagactgtattctatttccataacaaactggcgggatttcattaccagaatccctagcatctactcacatgactctttcctaactgccctatcagactggtcttggataaagtaaattcctttccaaagctgcagctgcctagttaggtattgaaatattgtatccacttgcaggtcaaaaaggaaaaaataacaacaacagcaagtggtccatgagagtgaagtggaggtattaaaactaggctgggtcttctcttggaagatgacagactgagtcccacagtgcctcactccattcaaagcaattaggagtgtaggattgcagtgacaacggatctccagggctatcatagtgctttacctaaagataacaagagattagcccttagtgacagatgactaatatattctgtggacactgactgagagtttgggagtttctactgtccctctcaaggagcttagagaatatgtacacgggaagacaaaaattaaagaaataaatgtaatgcactgtataatgcataatgataaatgcatcttcaaggtacctaagtaatttagaagatattgcagtgggagaagagtactgagatattcaccaaattcctaccagaaaaaataacacttgagttggctgatgaaggttgactaggagttcattagacatagtagagaaagtcattttagaaaaaatgataataaccagctttgattgagagctcaattttgcttgtcctttttggaagtgtactgtatgtatgtattagtccattttcacattgctataaaaaactgtccaagactgggtaatttataaaggaaagaggtttaattgacccacagttctacatggctgggaaggcctcaggaaacttacaatcatggtggaaggggaaacaaacacatccttcttcacatggcagcaggagagggaagtgcagagtgaaggggggaaaagccccgtatagaaccatcagctctcatgagaactcattcactatcaaaagaactgcttggggaaccgtccccatgatccagtcacatcccactggttccctcctacaatacgtggggattatgggaactatagttcaagatgagatttgggtggggacacagccaaatcatatcaatgtattaaaacagttaatctttatagtgatagtgattctttgaggtattattcccatcttaagaatgaggaaactgaggcactgagaggttaactcacagctagtaagtaagagagcaagaattcatacccagcagtatgaagaagtgaaggatgagttgggaatacagaacttgatcattgagagtcatactagtcacaccaaggaagttagagttaatcaattgacaacggggagctcttgaaaagaactgacaaggtcagatttgcattttagaaatattgttgtggaaacagaaggattgattagaaggaagccagaactggagcctggaaagttggctacatggctttcacagtaatccaggaaggggatgatggaagagaggctgcagcatgggagcaacagctggagtgaagaagagaggatatgtgtgggaaatctttaaggggtacatttggcacaactaggtgatagacagaagtgatgggtggggagtagaattggtgaatctactcttctaactgcctttccctatctccagtctcaccaagtatcttgaattaggaagcaaggaaaaggggtcaattaagaaaaagggagagcaaggttaatggagaacaggctcaagaaggaagaatttaaaaatggaataaggcaagagaggataaagaaactacctatggagtgctatgcttgttacctgggtagcaaaataatctgtacaccaaatccccatgacatgtgatttacctgtataccaaacctgcacatgtatccctgaacctgaaataaaagtttaaaaaaatagaatgagttaagagatttggtaatcttgagaaatgtctgtaaagtgtccatgtattccatgggttcaatggggatctgccattgaaattcatagacctgaatatcagagaagggtagaagattagagaatttgctgtttggatagtcgaactccttctttcatagatgaggaaagtaaagtctagagaaattggagagacttgtgttatatcacttagtttgttacagagctgaattcataccacccatttccatgtgccctcaaatagtagccgacctcttccttcctgggagagaatccttaaccaccaagtcctgatctcataggcctgatagtcaatccttggaagggatactgtggtgcattgcttagatccgtcccacttaaccctgggacccacatactcactcaccaacctgctgggagtgctggtcactgacctgtctcaactaggttgactccaggaattgctctctgctaaaggattttttctgtttcagggatataccaaaatgaaaaaataaaaattttatataaagagcgtttgttgcctgggttgtatgcctgtagaatacattcagaggtagaattactgtttcaatagtattaataaatttttacccaatggcttttcaaaagtgtgcatccccaatggcttttcaaaagtgggcatcaatacacacttagaaatatgcagtaggatcaatttcaccaattatctcaccatctttttagaagctaattcattttgcattcttaaattccactaaatttcaagagagcagttaaagaataatacaaaactttgaagcactaaatgtatatatttaagatattatgtcttctgtagtcaatggcaaatatcaagaatagagaagatgcacaaaactgaccagtagcagaaacagagatccacattctaatctcacgtctttctactttggttaaaggcaataattcctatttcactcactgatgagtctttccctaacgagaatgtgactaaaaccagttgagtttgcgaaagggatgtagaaagagacaattaggtaaaggtgaaaaatgagactgacgaagtgacgttggtcaatctcctgtttactgagtgcaggttaggaaataacatcaactaggttttctggaatttgagaactgagtattataaaaacactgactccgttattattattattgtcatttttaattttggattcagagataggagctgaatagcagcaaaaaaaaaaaaaaacatgcttatgaagagctgcctagtgaaaatgacactcctttggcttaggaagagaaagaaaatgaaagccttacttctttcttctactgattgaagtttttactttctgctgtttacttgggtttttaatattgaagacttctttgtagtctctgatgagttttgaagattaattttgcagaagtaagataatattcctgtttaccagaaatatttctgaccataagactcattatttatttattatggatggtcattttatatatttttaatgcttatttaagactccggagtacatgtgcaggcttgttacatggatagattgtgtgccactgaaatttggtgtaagaatgatcccctcatcattcttagcatagtagtcaatagtcaggttttcaagcctcaacccttccctccccctctagtaatccccagtgtctattgttgacatatttatgttcatgagtactcatagtttagcttgcaattacaagtgagaatatgtggtatttggttttctgttcctacatcaattcacttagggtaattgcctccaggtgcatccatgttactgaaaagaacatgatttcattcatttttcttttctgtggctgtgtagtattccatggtgtacatgtaccatattgtttttatccaatccaccattgataggcacctaggttgattctatgtctttgctattgtgaatagtgctgcagtgaacatacaagtgcatgtatcttttttggtaaaataatttgtattcctttgggtataaacctagtaatggaattgctgagttgaatggtaataccattttaagttcttttggaaatctccaaactgctttcaacagtgtctgaactaatgtacattctcaccaacagtgtagctttccctttcctctgcaacctttccaacatctgtttttttgtttgtttgtttttcactttttagtaatagccgttctgactggtgtgagatgatatctcattgcagttttggtttgcatttctctaactagtgatattgatcactttttcatgtaattgttggctgcatgtatgtcttcttttgagaagtgtccgttcatattctttgcctatttttaatggagttatttgatttttgtgttgaattgtttaagtttcttacggattctagatattaggtgtattttaaatgcatagtttacaaatattttctcccattctctaggttatctgcttactctattgatagtttcttttgctgtgcaaaaagtctttagtttaattaggtcccacttagcaatttttgtttttgtggtaattgcttttggagatttagttgtgcattctttgccaaggccaacgttctaaatggtatttcctaggtttccttctaggatttttatgatttttaggtctcacatttaagttttcaatctatcttaaataatatttgtatatggtgagaggtgtaggggtccagtttcaatcttctgcatatggctagctagttatcccagcaatatttgttgaatagtagcgagtcctttccccattgcttgtgaccatgagattttatgtgatgttgaaacccaaaactacccaaaggaattaactactgctggttaattgtacctatattaaacactttctttatagtattttccttatttgggggccatctcaaagtcctaacaatcagaatttgtgtcttctcatatgatttttactcagaattacacagaatacagtattcataaaaatgaaccaaccataaaatatttattcttctactgtgtcaggtagtcttgtaggttcctaagagataccaaatacaggttcataattcttgtcctcgaagatctcccaatctactgataaagcaagtaccatatgcatgaaaagataaatgtctttataaagtttcttaatcatgagtgcccatttgagtggtctgtgggtttttagaagttattcacagaaacgaggctccttagttctgacatggggaccatttgtttttattttcaaaaagctctatgaagtgatttggatgtaaacctctgaaaagaagttattgtcttaaatattcatgggaggctaggcctacttgcatctggagttggctccagaagtctttacaaagttagcttggcattggctgggtttcaaagaataaatagaaggggataaaccaagaagaaatgtggatatatatggggcacgattgaataatttccagaaagaaatcagatagtacaaggagtgtccagagaatgatgtatatggctgaaatggaagtgttatagaatggtagttagtaataaagctttaatatcacaagcatattgaaacaaattgcatgtaaaacactgatgtaataaaaagatttagattgttggagtattttgatgtcaagtacttgtcttcctggtgatgtgaaaccatgcatatgtgttttaagtagaaatgtgactccatgggaaaacatgtaagaacatgagcaaagatggatgagaatagggtgagtgtgaagggaaaacttattaggatgctagttctctgaggttataaagaccataaggtagtggcattggagtacaataaaaagatgacgacattttaaaggaagaacctccctggcagcatggctgaatagacctgggaagaaagagaatttatgcctgaatgaatggaaaactgatgattttgtatctcaaagtggataatttatttagaggcaactggctttggaggaaagagaaaatgaggggttttctaatgtttgagatgatagagaaacaggcaagcatagatactttggaggcagttggatatgtagcattggagtcaaaggccaagtaagaggtagagaaagagattttggagaacttctcatggaggaaatacttgaagtctggagaatggatgagacctgaagggaataagatatgtagatagagacaaaagttgaagggtaacactcagactttgggggagatctacatttaggaagtaggaggagaaaagtaaaggcacagtaagaaaaagaaagattcaactaaagaaaaggccaaaaaaagtgtaacccacagagaaaagagcatttctggggctaaggagtgatcaacactatcaaaatactacaggtaaactagtaaaacaagtaatgtcagcattagtttccttgtctgcataacaataatagttattatgaggtatttttgtgaataaactgaaatgatgactattaagcatttagcccaaggctaggtaaaagaaaaggctagccaaaagcatctgttattataaatataataattactaatcagcacccaactatgccgggcacttttgtagttacacatttgaataagatgcaaccctcaatttcaaagaggtaagtgtcaatacaaagataaagatgtgaagaatagatagataccattttgtggtattgtttctacaagaaagatgtaaatacaatggaaaaggtgccagtggagaaaagtgataactttatgagtcctttgccagacataagtgatagggttttctgtacatattacatgttattcttagacttgtgcaatttgctaagccagtttatagactcttgaatctgtgtaattgctatgttcttgactcaaacctgaagggacagactcttgggagggaatagccaggttcagccttttatctttcttctgtgcacagaactcttgcttactttctccaccatgggtaaatcagaatggctttgaacaatgagcattttctgcagcctgagcagcagttgctctttagacccaatttacaaattaggaaaaacaaataaattatttatagcatgacaaaaataggatttggcttaatccaacagctttctcagttacaatgcttgctgctcaagtaatggatcaattcacagttggctaaatccaggtgtttttgaacctttctatttaaagtatggttctctgaccagcagcatggagatcccttggatatttgtttcaaatgtagaatctcaagccccactccaaacttaactggataagaatctgcgttctgtcaacaactttagaggcactgtatgcagattgagaggcactgggctagaatactgaattagggctgaggaacatcatcacattctccacgctgtcccagtatactgttggatgatgtcagagcaacgtgaaaggattttgggttatggtttagctcatagtccatgcagaagaggccataattagcacagggtaccatggcacttctcatctgagacatgtgacatggatttgcacagatgagtacttctgacctattaatgttagtagtagaagtgatccttttgtcagtggaaaaagctgccagactcagaagcaagtaaaacctgaagaatcttttagaactgttagtcaagaacttcataggtggtttatataaaatttattgtcacttgctaactgcatggctttcggcatttcttaacctttctaaacttcaatcttttcattcatggaacgtagataattattgtacctgtatgacagggtcaatgaaaggttaaatgagtgaagatacataaagtagttagcacaggatctgggatttagtgagggcccagatactacttgtctgttattatttagtttatttagtttatttttatttatttatttatttgagacagagtctcactctgtcacccaggctggagtgtaatggcgcaatctcggctcactgcaacctccgcctcccaggttcaagggattctcctgcctcagcctcctgagtagctgggactacaggcatgtgacaccacgcccggctaactttttgtatttttagtagagatggggtttcaccgtgttagccaggatggtctcgatttcctgacctcgtgatccacctgcctcggcctcccaaagtgctgggattacaggcgtgagccaccgcacccggcctattacttagtttattattatttcattattattgagtatctattatttgatcttttatgtaataatagtgaaataatagacttctgaatatttgcagagaaatccaataattttaagtgatattggcaaatactatgatattagaaatctaggtggtacttaggaatctattttcttagtctctattctgtggccagggaaactctttattccttttgtccctgctatatttgagacaaagatcttgaatgcatccactcttccctaaggaaatgccatcaactcatcatccccataccatgcaaatgccttttacagctgcagagcaggtgtgggcagatgcatacagcagcatatgaacacatgtttaccctccttggccacactttgtcttactctatgttttctaggaacacattttggggtggaaatgcctttattccatttatatttagtcaattatctggtttagcttccattcttacaacctaattaaattcagcccatcaactcagtttaaggcatagcagctgtagacacttcgtttatctacttggagagaaaaaagataagttggtacaggggttccccatcttgtgaatgcaattcccattcaactacatgcaattgaatatgagcatgggatggtattctggacctaatgttaaattctgctactaagctatcatagttgaaataatatactcaactgcaactttacatattttccagggaaatgcaaatgattgcttttaaaggaatgacaactcatttgcctgcagatttcattcaggatatttaattctgaactactagcctatcacccattaactgccatttctaatatcttttgactccctcaaagagggaaactcataatttgtttcacttagaatttacatttttttaatattctagaaaccatgaaagaaatcactgagtccttagctcctgttttttttttttttttttttggttgttgttaaattgtagaatattagaatgtttcagttttactgattgtatttgttaatcattcttcttccactaccgttgtcttttcccatcctcttggaagggtgttagagaagactctatatctcacctacagatgatttcacctagaagcttagcctcccttcatgactactgttaaagataaagactgcctttggttgacaccataacccacaagaaatgattgcattcctcctggatggggagcaggtgacattgcagatgttacacttcccacatggctaagccactgatcgagattaaaaattcaaaagacaccaaagagccacgttattgtcccctcacagggagctctagaaatacatgacctaaattgtttcttctaagcatattatcagttccattttcaaggtatcaacatgatatctttccattggttcacaggaagaccaaagagtgacaagagaaaaatgtttccatttgtagtttttctacagactcatggtataggtcagcttttttattgtaaatatttaagatgtacatttaaggtgtctccatatatgtatatatatatatatgtatacatagtgaaattactagtagagtcaagaaaattaacatatccatcatctcagttacctttgttgtcataacggcacataaaaatctactctcttagcaaatttccatgatacaatacagtagtagtaactatagttatcatgctgtaccttaagtctctagatattcgttctacataattgtaactttgtaccctttaacctatatctccccatctcctcttccactgcatctggtaaccaactttctactctgtgttactatgtatttgactgtttattagtgtcgacttaggagtgagatcaaactctttcactctctctttctttcccgtttttttttttgtttgtttttgtttttttttaaacaagatctcacactgttgcccaggctggagtacagtcacatgattccagctcactgcagcctcaacttcccaggctccagggattctgtcacatcagtgtccttagtagctgagactacaggcatccaccaccacacctggctaattgtttgttgtagagatgaggtctcactatgtttcccaggttggtctccaactcctgagctcaagtgattctcccacctcagcctcccaaagtgctggaattatggtgcgagccactgctcctggcctctacagtatttttcttgctgtgtctggcttatttcacttagcataatttcttctgggtccaatcatgttgttgcaaatggcaagatctccttctttttaagactaaataatatgccatttaatatgtacatctaccacaatgtctttattcctttagcatgaggagaatattgaacattactttgagaactagaaaaaaatgaacatgtgggttattttagtggttaaaaaaaataggaaaataactataaagacatgaaccaactatcaggggatgtttgggttgtttccatatcttagctattgtaaaaaatacaagaaagaacagacatctctatggggtgcttatttcatttcctctgggtatacccagaagaacaattgctagataatatggtagttctagttctaattgtttgaggagcagccattctgatgttataatggctgcacctatttatattcccactaacagtgtacaggcattccctgaacttcactctatattttatttcccaaatgagatggaagtacatggaataaagtagtattcaagccagtttagtcttcacattctaaatcacccctctatgaaacctctccagattaccttttctccccatgtggatctgaatatgctcctttattcccagttgtcctgtatgtatccagttttacagacatagcatctgtaaaggacactgttgtcttacaccgaagtgtagcagttaagaactcagggtttgcacctttccagctctgtagacttgggccggcaactgagcctctttcacccatagtttctttatctagaaaacaggagtgatgcatgtctcataggaccggtgtaaggattaaatgaattgtaactagaaaattgttgggaaataccaaatataattatataatgactagcctctgtaggtataaacagtttaattacttataagtttacatgtctgcttatattaaagagggaaagacttagactgtagttcattttcatgtctctgtaacacagcactctgtttagtagttacataaatagtgattgaatgaatgtacaagtgagtgaataatcatctcaagtctatcctttgtcaaggaaaatttccagatagagttctttctcctttagggggtctttaagatggtcccagtgccagcccaagaagagccagagctagatcttcaaggcagtctgggacctggatcctcccctccagatgcctagaggtatctcctgggaccatgatgggtctcagtcataccccttcattcattggttcatgtcttcatagtcattttctttttttttttttaaaccactgaaataaccctcattgtttgtcattatttctaatactcaatgtagttttaaattttctccccatgctcaagaagagaaatggaaatatggcaaacatctccatgaacccacattttctcacatctttagatcaaaaactcttattcttcagataaacaggttgtaaaattttcagtgttgaagagaatgaaatatgacatttgattttattgattcattgcttatttttggcagaagttatcctttattcagtttcatctctttatgtcttaccacctctttgtgaactagccacttgccttgagggtttacaaattcaagatttctcagcacgattagccctaatagtatgctttccttccaaggtttccagattatccaatacagtattatttctatcccaatcatgtttaaggattattattttacatagaaataaataaagaaaggggaaccaatacaaagtgttagaaagacagctacgattaatatattggactggcccattatcagaccctctagattttacaggtagctttctgatcagaaatctcgggtgagaaatagtaagaatgatggccttagttaaatcctctatcaatatgacaggttaaaaaaaagacatatgagttagttaaaagcacctctcccttggtaactctaagtgttttagtttttcagatggcaatttgtgactttctatagctttttcttgagatgaatttgtggaccagttgaatagtgatagaaatacaggacttgctaaaaattacaaagtgtttatggcagttctggcaaatatcctctagatcaccagataatgccaagtcagcaatattatcaataatgagttgcctactaagaaccaggggaatgggggcatggactgaaactttaccatagacatctttgctattctggactgttggtttgcttcctagtgtacttctgcttatcctttcttccctttggcttcattgagatcctcagccactgagttctatcttggtgcattccagccacaccccaaaagaataacaagaatgaataagccatccatctctgaatgtagagcaggttggaaaatgataaccttattcattattattgcttgatacatttccgaatttgtgttatctgtcattaaatagctaccacagccttctttcattcttctcggtatcagtttaataatttgttcaatgaatatgagaaagaacaggatcacatccagattttaccacttactggctgtgtgacactgggtatggttattaaccccatggaacctcatctttaaagttcagatgatggtaactaactcatgaggttgctagggattaaatgaagtaccatgtttaaggcttctggcgtgggtgctgagatatagcagataagagatggtagtcaaaaagaatgtgtcttactttttttatagtatatagagtgacaattttcaatacaaatagtgtctgtatatatgcagtcttaacacggcattttaaaatttcattgtagactttaaaaaacctaacaaattggatttcagcctctttcttactatattagaaaataaaagaagattaaaataaaaaaaggtttccttttaatcaatctattaataaaaagataagtactgagattccgttgacataaaagtaattgaaagtttataggcaaattcttgaaatagaaaggcactttttttcctcataagaggacagtttagaggatttaaaaagcaatcaaaggtctcatgttttatatgatcaattcaaattgactgaattttcatcatcatcctcctccctccttctttctgatagtctacatttgtggaatagagagatttttgtctttcaaattctaaccctgaggatttttgctaggcacaagttaagacctgtattgttttctcctaacagttcctatgacatttttaaagtatttactttattctagtatgtccattctgttgatcttcgaaggacctgtgtctctaggtgacatctgtattcaaccaattttgaagactcttctgattggatttagcaggagatttgtagagtgtggggctttgactaggcccaggtcctttgccagccaggcatagtttgtccttgtgagggcagatattggaaaggtggaggagaattatgttctatggcactttcagaagctcgagaataccttggcagagccaagccttctgcttagggaatggctagcagtaacaaagcatggtacctgagatcaggtacatagtcaagagttaggttgaaagtcgaatattaacctgaaaaaggaagatttggcagcacagtgtatcttacagtcccaggaaaagagccagttgacatgttctgtgagacttcagaaaactgtacgacgtgaaagtagaagcatttctaatcatagttatattttgagtaatctcttcacagtagaatgagtcccccaacactggatgtactaaagccaaaggaagggccaccacttttcagagttattgaaggaattcacccatcagatatgttttgattttattcagtgattgttcaaactagatccgtttctctaccttattttcaatgggcagtggttctctagttcatcaaaaagtttttcctctggaatttttgagaagcaatagaaatccagagcatttaaaggtgatgattaattagtatattaatcttagataaatgtccccagataatttttaaatgatcaaatttgtatcaaagacattatttattttagcatcattttgatttcttctactttgttgctggggttggggtaaaagagggagaaatggagaccatatataattccgaaatgaaaaaaaataagcaacaatacactgaattttcttagagtaaacataatgctatgctgggttgttatagcatttacaatgctcatcttcccttacacttgaatgacttcctcctggatctgaaacaccttcctcaagagcatcatcacaggactgttaaaaatcctaacatgttacaattttactacctttcttcttccagtattccagcttggagactttgcgtagccctggttaattaatgttgaacttttcagggtatctgtgaatcatggtggggggtagggttggggactagaatttaattaaaggcacaagcttcatggggattgtgaaatcacagattccaaaagggagacagccattctagggagactgctaatagggagtaagcagggtgacaaagtgtgcaggaactgaaggaagatgacattcaaaggtctaaacaggggagaagaaaaacaaagagatcagcatgttacagctgagccttttcaaatgcacggtgataaagaacagatatgttttgtgtgtgtgtatgtgcgtgtgtgtgtgcgtgtgtgtgtgtgtgtgcgtgtgtgtgtgttatgcacagtggcttgaaggtagcagccctttcccctgatagaaatttgatgatggcagcaacaaaacctaaacagagaataattaaagagtaagggggtagttaatgaaatgaaaataactttaaaaggatgaaaagaaattgttgttaacacaccatgtggtttacctatgaacctagctgctgtggaaacataataacacagagtcagctcctgcaatgcaagtaagccacttcctgggtagaaatggggctcttcggaaaaagattaacttttctgtccacaggggtattatttagctcactggaatagcaatttgacaaatggtgcctttatggcccaagtgaatactgctggtttctgctaaaagggcaggtgctacaaacccaagaagaaaaacattcttgcatacttgcccccctcagcataaggacaactttgagcctgttcatttttgagagttccagcagtggaaagaaagctctaaggtttggtaacctgtgactcacagagagcagaatttcaagcctagttgagaaaacattccttcaagagggtgctgcttatctgctttggccacgttggattttggaatcttaactgttcttgtcactttggtcctggttcaagtcaaaagagtttcttctacttgggacttgaattaggtgaagactgacggacatttatttacgtaccaaaatacacaacatatgtgttgcagttagttcctccttacagaggaactggtaagcactttagccaggtagggctaaggcaattttcacagttctgactgtatgaggattcctgtttctttgttgtcctattttatgcatcatccactgattctcatctaaaccccaggccattttgcgtgaaaatagtccttctataaataaaaaatttagaccagaggcaaaggagcctccatctctctgcttacaattattgctcaatgttcaaagttctcaagacttatctcttcctattgcaatccctaatatacccgtatatagatacatttaggtctgagaatgcttgagcttaaagagagtaagttcttgtttggtacaagctctgcataatacgtctgagctgtctccctgctttagaatgcagtggtagaagttttttttacagcactctgattttagccaaggaactaacaaccgttgtgtaatgcactagctaaaatagtctcctttatcgtgtaaaagtcatccattgactcatttatttatttaccaagtgcctactatgtttcagaaagggttgtaaagggaacagctaagacaaggtccttgtcctcatgcatgtcatactctaatgagaggagacagatcatactttaattggtaaattatagtcaattgccaacagcagtaagtgctagagaggaaaggaccagaataagggtaggaggtacttttgagaggtgacaacgtgctagcagccctcgctcgctcttggcgcctcctcggcctcagcgtctgctctggctgcgctggaagagcccttcagtccgccgcggcgctgtgggggcccctctctggggctggccaaggcctgccctctgctggcggggaggtgtggagagacaggcagaggtgggagtcggggctgcactgggcgctcgctggcaggcaagggttcgggctccgtggccccgcactgggcgcagccggctgatgcctgctgggcttgaaaagggacgagctccctctgggctgccggagtgcccgtgctaggttccaaagtcgccagtgagtgccactgagaggtgaagccggctgggcttttgggtggagtggggacctggacaacttttctgtctagctaaaggtttgtaaacacccaatcagcactctgtgtctagctaaaggtttgtaaacgcaccaatcagcactctgtgtctagctaaaggtttgtaaacgtaccaatcagtgctctgcatctagctaatcaggtaggggacttggagaccttttctgtctagctaaaggattgtaaatgcaccaatcagcactctgtgtctagctaaaggtttgtaaatgcaccaatcagctctctgtcaaaacggaccaatcagctctctgtaaaatggaccaatcagcaggaggtcggtagggccagataaggaaataaaagcaggccacctgagccagcagcggcatcctggtgggtctccttccacactgtggaagctttgttctttcactctttacaataaatcttgctgctactcactcttagggtctgtgccgcctttatgagctgtaacactcaccgcgaaggtctgcagcttcactcctgaagccagccagaccacgaatccaccagaaggaagaaactctgaacatgtccgaacatcggaaggaacaaactccagatacaccatctttaagaactgtaacactcaccgcgagggtccacggcttcattcttgaagtcagcgagaccaagagcccaccaattctggacacacttcgagtagtgtggttggagaaggtccttgggagaagacaacatcacacctgaaataagagagattagaaggagccagtgataacagacctggaagaagggaattcaggacagagggagcagaaggctctaacgtggaaacaagaaggccagagtacccagagcagaatgagaaggggattcctaatcaggaaggaatcatatgtggttgttcactgagagcaatcattgacagtctcacccatgttctacaaaatttcacttcatgattaaaacaaattatatctctgtctttgcctaagacgtgtattaaataacagcaatacaaataataaacatattaagtccattctgtgttctagtcacaatattaagtattttatatatattatttaatcttcacattactgctaagaagcagtgataaaaccaagattttaaaatattaaccaatttctcaagactaaacacagctagtaagttgcacgacctggatcaattctccattggcttgtttccaaagccacaggtttactttaacatatacagcttttatagcactaacattgtgttctatgtgtccgtcattaagttgggtattttacacacattatcttaatatataaaacaattatatgcagcagatgttattaccatgatactgcaaataagaaaactgagaaatagaacattcaagggatttgctcacagccaaataatagtaattggcagtgttaggatttagactgatttctgtgtgatctgtagtccattctgttcaacactacatgtacctgccttcccgtggtatcattgccccagttctgaaacctaggtctaggtcgcaggagaactagcttgataaggatgggctttagagccaaaatttaagccatgctttgtcttatctgcataattttatgttcccagtcaggtaaaaccttacccatttatctttatttcctatcaaatgcagacttccctatgagctgttgcttggtaagttccaacccaatatgatgtcaccactgggtggacctctatggcacctgtctcactctgccttggttccagttatttttgtatatgcttcattgattatttctactcacttcccggaaatgttccctttccctgagaaatggagttgtatctccctcattgatgcatcctctgtaacatctagctgtttaatgtgtcactcagaataagtgctcaataaatatttatcaaagtagctgatgtttcaggaagtctaggaagcaaaccacctcttctgttctgctcttggattcaagaacttaagaggattttgttggaaatccacaaagaatattttaaacgagacacataataagactctcttttgagatgagagaaaccaacaacagcaaaagatgggtggtaacagaacggtgctgtttgctgccagctgatgttcttcttgcctcctggaaagatagagccagaagtcttccatcacttcttgggatgagccaactggcctgttttaacctatattacttgagttttggctaccaaaactctaagcattcacatgggcccccacgaagctctgccatctgacactttcagcaccttcaactctatccagtctcactcctgctgtactaacaaacattccataaacacaaaaccaaaaccacttaaaaaaaaaaatcttaggctgtccctacaacttttgctatcctcacgaaagagtgttactccagtgagacaaaagtccatcacaagaaatgatttttctacggaaacagctgtgattggagcaagatacaaggtaaaacatgttgtggtcaagttcaaggagaaaacagggtggctagccctagcaatcctactggtggacttacttctgcacacttcatgctactatctatcctgtgttgtctaaggctatataatgtcgagagacgggctagtccaggaatcatgacagcaaatgagggagagagagagagagagaggagacagagagatggctcttgcaacctttccaatagcttttgataggttacgtatggaaaaagcctcatattgacatcaggtttacttaggttcaagtgaaaataatgtctttaaaataaattatctcttttgatgaaggaagtcctttttgttttttgataccatgttgcttttgggaaaacatgcctgaaagtaggcaagtttctctaaagcaagaactgtaaaactcacagaaacataaagttgacttgatcatgcccattttataaataaaggaatggagactcaaagcggttaagggacatgtctgcagtattttacccgtgagctatatgccctctgggtttctcctcatccatctgcccccaacaactatgctctttcctctttcctttactgtttctgggcatatcaaagccaaacttaacagcaccaatttcacattaaacaaaagaagaggaacctactgaccaacctttccccatcgccaccacgtctagcctcgccagactctggtaatcattacactactctgtaattctaagatcgacctttttagattccatatatgagtgagatcttgaggtatttgtccgtctgtgtttggtttatttcatttaacataatgctctctaggtttacctttgctgcaaatgatgttctggtgttctgttgcacagtagggtaactagagttaacaataatatattgtgtcattcaaaatagctagaagagagaattttgaatattctcaccacaaagaaatgacaagtgttagaggtgatagatatgctaattgcccagatttgatcattatacaatatacacaggtatggaaacatcacattgtaccccataagtatgcacaatgattatgtgtcaattaaaaacaaaataaaacataaacaggagagaaacatgagctaaaaagaaaaccagtaagcaaatgcactagctgaatcagatcattttatgcctcttgatcggactttgatggtgggaacatcaggctacaactcttgcctgaatccacagacatggaaggcaagagaaattatttaagcctatgcaatcatccaggaatggaaagtgggaatggggttcaccaaacgtactagttttctagggctgttgtaacaaagtgtcacaaactgggtggcttcaaacaagacttatttttttcctattctaaatgctagaagtctataataaagccagggccacattcctgctgaagactgtagaatccttccttgcctcttcatagcttctggtatgtgccatccacctttggtgttccttggcttgcaactgcatcactctaatctctgcctgtgtcatcaaatggcgttttccctgtgtgtctgtatttgtctgttctcatgctgctttgaagaaatactggagactggataattcataaaggaaagaggtttcattgactcgcaattccacatggctgggaaggcctcaggaaactcaaaatcatggtggaaggggaagcaaacacatccttcttcacatggaagcaggagatagaagtgcagaccaaaggggggaaatggcccttatggaaccatgagatctcatgagaactcactatcatgagaacagcatgggggaaactgccaccaagacccagtgactccttactgggtccctcccatgacatgtagggattatgggaactactattcaagatgagatttgggtagggacaaccacatcactgtctgtcttcacatggtgtttctttcttcttataggaacaccaatcattttgagttaggatgcattctaatgacattatattcgtttgattacatctataaagatcctatttccaactaaggccacatttgcaagtactagggattaggacttcaacatatctttttggagacacaatttaacccataactccatgttataactgtactttttcagaatatcagtacgatggtgcccctaatcaacaaatatattgtcaccaatatgctgcagtctgggagaacattcagggatttaatttttctgacacacagactgtgagttcttttgttttttgtttttgtttttctttttttgttttcagcacatcacactctggctgtcattatcagttccccataaactgtgataatttttgtgtcacatagagtgtttaggttggcctctgatgaaatgaagcccaagtacttgctcttccaggcacctaacccagggcaaaaacacagagacctaaatgccttctctcagattatttttttattatatttccagtgagcagaaacattacagatgtgagacttgttctagaaatcagagtatttccccagggaagcattatcactgttcagatattactaagaagtgtaaaatgctggagggcaattgcatccacaccgtcctctgcccatcactgcaaagggagaaaggagaaggccatggggggatgcagcaagaccccaaggtctaggctcctctgccaaaggagcatggatgaccaatttggaaagaacacttgagaacctctgctctgtcctcttcacttcactagtgagaaagctaaagctcagaaaggataaatgacttgactaagctacttattggaaggtgggtgattaggatgtagcataggggtaagactgtgtaaccagctgacactgctttaaatgataaagcattgagttgttctgttttaatggtacacaagtcaaaattgttcaaggattgagagtggagccagaaagcctgggtgtaaatcctggctccttcacttacaagctgcgtgatttggggcaaatcaggtaaccccttcctacttctgtttcattgtctgtaaaatggatattataataatgtttacttcatagattgatgtaaaggtcaaattcataatatgctaaaagttcttggaacattgccttacacagatcaagtgttaaagaagaattgatattattattattgttattgttattattcttattatccttgagttcataatcagggtgtcctgaatatactacacccaggaatggaagccccaccacattgtaaagacacattcacttcccttaaacctcggcatatttgaggtggttgtagcaatagtggagggagagcagcaaggatggacacaaagcttacagtcacccagcagtgtaggaaaggggggaatcctgcacacactcccagacatggtggaggtcctcaatcactgcagagaagactgttgtgggaatgacagcaaacatgtagctcatcaagaaaatcagctgacttattagttcttctggatctggttggagtccctgaccccagagctaaattataaaggttattttgttgtaattttgatgctctaagaaactgatgtaagatatagaaaagttcttttttttttttttttttgagatggagtcttgctctagcacacaggctggaatgcagtggtgccatctcagctcactgcaacctccacctcctgggttcaagcgattctcctgcctcagcctcttgagtatctgggattacaggtgtgcgccaccatgcctggctaatatttttatttttagtagagatgggttttcaacatgttagccaggctggtcttgaactcctgacctcaagtgatccacctgcctcggcctcccaaagtgctgagattacaggcatgagccaccgtgcctggccttataaagttcctcctatattatacgtgcccatacctctatactagtttttctctcttaaagctacattgccatctcttgtattatccgtgcatttgtcacctgccacttgtcccccatgcccctcctttctagcctgtggtttataacatgctgtaagtctggaaaccaaataatcatgtttattagacttgtatgtaaatcgaacctaatgctcctttcctttgttgttgttttccttgataatgtggtcttttaaaagagtaaaatttgaactaggatttatgaaatctaggtttaagtttgagttctttttctacttatgtgatcttattcgagtctcctgacttctttggataaagcccaaaacaccattttacaggtgagaaaactgacagagtgacgtatgagtagaacagaggagaaaaggaattgaaaattcaggtctgtcaaactgtaatacccaggttctttctgtttgataacaccgttttcaaatgttgagaatgactaaagaaagatatagaaatttgtaatgattaggtatttatacattctcaataatgaattttggtataaaaacatatttttttatctaactatatttttcatgcagtcatttcagtcagtatcaccatctaggtttcctctagggaccacatatcaatgactcttaaaatcactgttgtgcaaggtgagtgggaaaggaacaggatggtagagtttggattggggaacagactttgagcactgaacagcaggcagcattgctgttggcagagtaacggagaaggcgctgaggcttacccatgccatcatggcaaaaaatagcacggaaacagctggtgagctgtcagaatgatcttaaggaggaaatgtgaaatgtttctgcttggtgcattaatcgagagttatttggacagaactgaattgccaggggaggaacaagcaaggtggtaactcacccttccctgccctttcatctctctgtaatacggttctatgtcatgggcctccttcacatacacactcccccagttgtccattactcccaccctctccgtcttacccacacctagagatatgtgtgcacacatccaaagagataacagaaaaaaaatccatttgaaatgcttacagatatttcaagacaaaatttaaagagatattggacagattagcaattatgacttttttaaacttttattttaggttcatgtgaagttttgatatataggtaaactcatgtcaccgggctttgctctacagatattttatcacctgtgtatgtaagccttgtacccaatagttatttttttctgctcctctccttcctcctaccctctaccctcaagtagacctcagtgtctgttgttcctttctttgtgttgatgagttctctagaaatctttgtgattagttgtagttgagtactaatgtggctttgttttttttttcatggagttgtttaaatatgtgtcctgattaatttttgttaactgttatactaagacttttcaccatcaatgaattcagtgaagggttgaagggaagaagtgcaggaaaggagaacacacaaatgagaatgtcagtcttgactgctgggtgaactttttttcgctgtagaagatgaaacaaattgagggccaacctcttgaatcaaattgcaaagtaactttctgctgggaacagtttgagtaacccgaagtagctaaggtcataaatatttttacaggtggctaaggaaagagcatttgcagccatggaatcaggtgttgttattttgggtgtgaccttgaatagaggctgctaacttttggcttctgtttccgataataaatctccctcctccccacccccaccatcagccccaaggaaagatgaatgactcaggtgcttcagagacttcccaagaagtggtttcagtatatgcagcaagtggacatttagaatggcacagttatccatataggaatattgttgaggcagttcatcttgttgtccctatagtgtaattctttggagtagaaagcaaagagcaataatttgtccaataaatgaaataaggaaatgaagagaaaatttacataagccagggaggccaacttaattttctaaagtagtgaattgactttttttccttggattttgaaataaatggcaataaatccagttgtggggtagagttctttgctttcagtgatagcttaggaacattctgcagattgttaggattgcttgtatgtggttttaaatgaatgaagctgtttctatacagctattttcagaaattctatgatctaaatgttttagattcaggcaaataaatacatatctatattgggagataaggtttttgctcaaacaagcaatgagtagttttcccattcctaatgtccacactatcttgaccactaccaagaaacactttttgcaccatgatgtgcaaaccatgtatttcttatcatcttgatgctgttgctcattttgcttaagttttaaagatttggcctttctctttttatgttgattaccaagagtgtctttgcaaagtcctttatgcagtactcaaagtatgtccatgccatttagctcctataaagaaaacaagtttttagccttcctaggaaattaagtttcctacaaaatatatgctcttcaaaagctctctcggcttcatttcaagcatggaaagcttgctggtgacttttgttctacttgatacggcatatccattcttgagtgaggctgagtacaaacagcattatcctgatgtaaaggaaacaaaaataattctaaccactaattaactaacagcaaagagactgatagtcttaaatggaaagaatacttccatggtctagtttctagagaacactaccaggggcttgaaggtaagtagcctctactggaggctaagggaagctaaacacttaagttttcttctatattatcagttgctgtttagaataaattataatctccacgtttttttttgagacagagtctcgctctgtctcccaggctggagtgcagtggtacaatctcggctcactgtaacctccgcctcctgggttcaagcgattctcctgcctcagcctcctgagtaactgggattacaggcgcacagcacctcgcctggctaattcttctgtatttttagtagagattgagtttcaccatgttggtcaggctaatctggaaatcctgacctcgtgatttgcccacctcagcctcccaaagtgctgggattacaggcatgagccaccgcgctcggcctcttctttactatagagtaaaagttgcatggtcgttttcttgcatttgggtcacagcttcagaaggttattaccaatcagaaaaaggttttgagtcttttatttcctaaaactgagtgtattcgttattgtctaatgacacagcataacaaaccactgaaattcagtggcttatcataccaaatatttacgcccatgtttacaggcctgcaggttgactgaaatttggcttgtctccgctgggctcagcatgttggctctcctttggactgcaggtcagctaggattggctccaggctgggattaggttcagatatgctccatgcatgtttttttctggggctcaaactgaagggacagtgtctatccagggcttagtctttcatggtacatttctgcagcacacaaaggctccctccaaatgcagcaattccttcctcagcggtagtagtccagacagaaacagttttggtggttgcttgagttctcccagttgttctcctgtcattttgcaggtcaatctgcttcattataggaacattctactggagaaaaaagtctatcattattcaaaatatccctccttatgcatacttcccactgcttagatgtctatactcagaaaagttactatgtggtttttctttatgggacaatactgcgtgatcgtggcgttcacatttctccctccaagtccttgcttttctagtttctgtaatcattcctcaggtgacataaaagtattttccgaagttttgccattttcatcacacaatattgtggacaaattaaagcctattgatgactttattaaagcagggtatttaccacaaattaggattctctgcattttgcctgactcctgcagagcacagagaccattcttgtctccaatagcaacactcttctattaatcaatcaagagctgacatgaatgtttttatagagattctgttccacttagcgatcctattgaacccctggccatgtggtatccccacagctcttcttctgaaatcccattttgaccaagccatccaaattatacacttagactgtaattgtttcttttccataaatgaatttacattcatcttaattcacattcgttgagattttttctctgtttccaagtctcttcacagcatttgtattctgtcattcaatacatttcctccaatacatcatatcacattcatatgcaatatgaatgaacttgtaacaatatctctctttttttttaattcaagccactgatacaaatattgaccaggtaggttgtaaaggacatggttctgtggccagccctgcaagatctccttatctgtttgtttagtacaccatgtatataatgtgtaagcctgcctcagttttcttcatggtggcctcagagatatcactgaagacctatctgatgctttgctgtgatttttattccctgttcacgccattctcctgatttcctgtatagtaactatattctcaagaagatgagattagtttgatgtgactattctttgtgaagctgtactagctaattgcatttcctcttagtttctaaaacccagaggtcccaaagtcaaatgctttgcagccaggcaagtaacaaatgtctgggtcagaagctgggtattattcgtcatttcatgaacagaaatatatatcctctgagtagaagactctgccagcagaacaaaattcttctgttagctaatttcactagccatcatatgatttagcttctgaagcagcttgctgctctgttattcgtgtgaactcatatcctttctcatttggaaagtcaagaccacatgggtacacctcttatcacaagcttcgtagagaccacaaagatgccactttagtcccaactcactaaatctcctctacaatgtctctaaaaattatccaatagtgttttttaaaatatatatcaaattatgctatctcaccacatcacagtatagctgctactattcctcctgtcttcctgtctcagaggaaaaatttgcttatcaccttccacagttgagtctacctaggtccttggcctcctgcccttttatcttttctgagatctcatgccatctgttacctcatctctattttatctgttataattcctctcctctgcttcttccccagctgctcagaacatactgaaatatatgtaagattttgggttttttttctggtcattttgctcaatgacttcctaataccaactgaagagagtttatatttcttaatacaacattgaaagcctaacatgatttggcctcaacctacctttttttatccagtaaaattcatttctctctaatgtatactatattccatccaaactaacccactgattagacttcatttttcttttaattactgctttttgctgtgctggtcccactgcttagaatgttatttcctcaaccttatttctgtttcctacatttgttgaaatcctagatgtccttcagaacccagcctctgagtcacctcttgcaggaagccttccttgctttccctagcagaacaacaatttctactgaaaccctgttgaattttgtctccattattgcctttaccaccttctatgttttgacagctattttgactatgtcttatctacccaattgtaaacttaatgaatacccacactgtatcctatttatctttatatctttagattgcaacacaattctttgcacatagtgtgtgccaaaaaatctctattgattgatggtgcaattctgatatttattaataatgatcaatctaagtatttatccaaatcaacccaatgccctatattttgggacaattacccttgagatttttataaaccaaattcaccccatgtaaaacagatgaaattaaccttaatttttatctgatgtgtaatggctaattggctaaatttctttcataaatattacatatgtactattttttatctctataagtattctagtttgtctagatgaagaaacagaggctaaaaatagttaaacaaaaaattacctgtttcagagcttgaaagccagatctgtccatggaaatctcctgagagaagaaggtttggggatgcatataatgagagcagagaactggataaagagatgtctggatctatttttggctgttgtttagatttactttgtgactgaaggaagtttatctgaggctttcccatttgtaaaactgagattcatatacaactgtgcaaaatatgtgtccctttacttacctccctctaagagattaatgagatgatactcaagaagcactttgattttctctgatgaaagaaatggataagtatgaaatgaagcatttactacttctatcgaaggtttttaagatggcagcctttaaaaattatcaaagtgaaagctaaaggaagaaacagccgtgtacattttaaatcaagtcaataattattgtagtgcacctaatgattctctgatatgtgttttgtgcattaaaatttaccaagcacttttacatatattatctcatttgatccacaaaactatcctgtgaagtatgtaggctaggtggtttcattaccatttttgaaataagaaaactaatactcaggccaaatgacttggtcactgctgctcgactcatgtgaaacagtccagggttaaactcaagtttcctggattccaaatcccaattcaggtatcttgcatttctgtccacttgttaacatcatagcatgcacattggaccatctcctctgtgttcacttacattctatccatgttcaggattgagtttaaatcccatttctgctcttaagacttcccttatcactttaactgaaaggcagactttcttattccatattttttttgtccttaaatatattgtttcctggaggtctttctagtgagttggatttcctgtattccattcttccttaaaataagcctttggaattcagcccagcttccacacttcttgatagctgccaccatccatttcattcctgggactgagcctcagcacaaggattatttaaaagttaaaaatagttgtattcataatcccagcattttgggaggccgaggtaggtagatcacctgaggtcaggagttcgagaccagcctggccaacatggtgaaaccccatctctactaaaaatacaaaaatcagccgggtgtggtggcagacacctgtaatcccagctactcgggaggctaaggcaggagaatcactagaattcaggaggcaggggttgcagtgagttgagatgcgccactgcactccagcttgggtgacagaatgagactctgtctcaaaaaaaaaaaaaaaagtttttttcgtgtcggtattaatgcctggtataatacctcgcacacagaaggtgttccatatatgcctgctaaagaagtggctagactaatcaacaattatggatgggagggaaggttcagaaagtttggtgacaatactgggaaaaaatgttggcacctgataatggtggacctgggataccaggctgaagagtttgaaacttgcccttttggcaacaacagatttattggcaccaaggaatagttttgctggattccacttttgaactcatcaaattccttgcttttcttttccttgtcttttcaatcctactgggacctcctcccaccagtgccactttactggaggcttgtgatatgtatgacaggcagtaaaacccaagtgaatcaaggaagcctgttaagagcactgatttctatgatgtctcagtttgttaactaaattgcaggttgtactgcttggccagagacagctgacaggcaactctgcctgaacaagtagcatctccaaaatgacatgtgcactttagtttcattagaggcagtggtatcatgattgcctgggccattgcaataaatatggtgatcatatgtatcccttgggatttggggttgacagcatagttgggctgcactaaagagtcttactctgacataaatgacggcaaagtagatctctgggcccctcagcaaggaggcagaagttcatgttgcaaagaaagttccacgggcctactgaaatattaccaatcaaaattacaatttcatttattgacaagtcatatttaacattcttctaatgttttttctcacatgccaatgtccaaaaagctaaaccatcagctgcatgatgctaaggctttcagcagtcagcagaagcagtggtagttgcgagctggttattcagaggcagctactgtgctccacataaccataaagtgaacattttgacattcccgaaaatgtaccaacctccaagtcacaaatcctctgtagatgcctgtggattggcttttcagatcctcttaaaagccaatctgtggtggcaggattgtctgaagagggtagacttgggcttctggtacgttacagaaggcatggtttctccatctacactatgctataagacaactgctcttctctgaaaagaaactactggaatcacacttcttgtaacttctctctattcccttatttagttggtgggattggatgaaggatcttcacatgtctagtgagactcctttcttctcttcttcctatccaaagggcttttcttcctgggctgagtgtatccaggcctatttcatctttgtaggaggcaaagggaaagagaagagaactagaaattggtgtaggcagactgatctgtggccaggtctaagtgttgccccaatccgttctcccatccaactccacaagcagtaaagtttgctggtcctttcatctatgtctatttctcaattggcttggatttcacaatgaagagggctatgatttattggcccacttaaacctcaacatggtagagtggcaattttgtttttctggctcttatattgcaatgaatattttttatttgacagtctgttataaacgaaaataatttttttcactatcagtttctactcaaaattaaatggtagctctagaatagtggcctgcattaaatttttctttatggttatagccatgcagatagatgcatgaactcagaggactaaaaatgtgtttccatgtaatttaaatgtacctttctatacggaacggtctgctgtcatgcaactttcaaataatgcattttattatcattatcttttccggcattgattaatcctactgtttattggctaagtgtacatttcctattggtatgtttctgagtcaaggtgaaagcagttaatacttaagagttgagaagcaagtttatttaaatctagtctttcttatgagtctgcctaacagtgatagattttgttgttgagccacagtttatgaaaagtgcattaaaacctcgagccgacccatctctctgaagcagcagttgggccattacattttggcaggcacttcagatgtgtgtatgattttatgatcaggtctgcttaattcatcccaactcttcaaagaggaagggaactaaaattccttgagcatcttctagtatgtgctagatgcctgcatatgttgttttatcctcatgacaatctctcatggtagatagtattttttcagcattgaaggtgagaaaattgaggttcagagagtttaaataatattgtcaaaaacatataggaagtgatgaagttaagctttaaggccaggcctgtctactcaaaagcctgtgattgttatattaagggttaaaaaaacaaaaaagtttgcaagagacagacaagttatttgaacggaatgaagtataagaaaacctgtgctttccttaatttttcttgaatcctgtggccttctcagtctatcctttattgaggttcagagaggttgctacttatatggtagcaaaagtatttcccttccctacttaccctactatacaaaacaaacaaacaaacaaacaaacaaaaaacagaaaacttgatgataaatgtcaatcaacactcagcctctgcatctgatgagcaacagaaattagcggggactgtggtgaattggaaaacctgtgcctttctctcccaatcagctctggctgattgtcctacagaaaatgttggctctgtgttactaaatcttaccattttttaaaagaacagtctagctgttcacgagagatctgatcttaaaatgttgaaaactaattcacatagaaaaatactatgtagtacccacccctcaaaaataaaacttatgtgagcactcgatccagcataaagtctctgaatttgtaagttctgtattacacaaggcagctaataagtaactactgggaaaaataattaacaaacaaaaatcaaatcaaaataattttcattactcttccaataattgtgccttccagatttagtactgtttgtgtattgtgcctctctgtggtagaggcatgacttctggtcctctatctgcccttcacagagtggagatgaggccagtatgcaatgactactcaagttttagatgttctgagcacttgtttctgtgctttctctggatagatctggtagtttggtgagcagagttggcgtggctcatcagcagtcaccctttggcaatggaaccagaaaagcatcatgctgtctgttaaagaatgtgtctatgcttgtagctagtttcctaagatgtttgcctctaggtatttgcctgcagaaagttttttgaagtcaatacaaagtagagtggcaagcgatgcatccatgtttgaggatttgggaagcatttttctgtattctttcaagtaaggcctggtcgataagtttagccacactcaatctaattccttgtctgtatccttattatctcccctcctcttctttaagttttcacttccttctgaccttaatcactccctcaatgaacccataagtatcactgaacatgggtgtcaccagttagcaacagtaagataaccgctaacttctgaaacatggaagctctagcattgcttggatgatgtcttccctgactgcctgtgagcctctggccaggatccggggtaagtgcctcacaaatcactgttcatctaaacagctaaagctcttctcctgatggaagagggatacctacagcagaaagcaagggagtccaccaggcacgtttggaaaataaaagattttatttatatttattttgactctatagtttctaaattccataaatgaaattttgccattatcaaggaaatatttgctagggagtataaggaaggccctttgggtaagagagaagatattctctaagctgtagcatgtttatgaaccttaaaaattacttgtctgtgtttgtatatgttcagctctgagagtcttccttaacattcaaatgtctctgtcttggcaaaaattagtgaggttttagaaagtagaaaagctggttgatagtgtaaggaatttttaggccaattttctattttttccttctatagactgaattttatttttataccaatagtttcaatcttctaaacttctcccattcctctttactttctcaactgcatccacttaaatacatcttattgtttcagtcagccttggctgctataacagaatggcatagattgggtgacttaaaaacaacaaatatttattgctccccattctggagactaggaagtccaaggtcaaggtgccagtcaatttggtttctgctgagggtccatttcccgactgacagatggccaccttcttgctgtatctttacatggaggagagagaaatcatgcctaatgtcttttctatctccgggcaggtagtgcaggaattgaacttggttggaggacatccagctggtgtctgctgcagattgcttgcttgcttgcttgcttgcttgatgtgtggggaaaaacctccacacatctagcgtcagaagcgtgttgtgagagtataggagaaactgagtttgttttttctacacagaagaatttcctatcctgaaggccaggtaatgaatcctctttctctggttacttgggcaatttatcaatgactgtctgtggatatttatttggaaatattatatgggaacgttccttcattttttatatctcaatttaggaaaccatgtgcttctttctcatttctcttttgtccccatcagcgatctatatttttttaaattgttattagaaacatctcttatttaatctccatcatcacccaacaagctcagcaatgtgactttgtcttacggatgaggaaactgggtgcagagtatttgtggctttccccaaaacctgcagtaagtgaacaactagaattatatccaagccttctgattcaaatgcagttgccctatgcaccacaccaaagtatcgtttacactcttgagggctaaagaatgccagatgtatttatctaacttctgatgtgcctcccaaaatgccctatacagaggataggatcaatacacacttgatttcaaaatttctatgacttgattctacttacacatcttattgatttggagaaataaaggtacttcttgggggaaaacatgactacatgttaaaattctgaatttggcaagtctagtgcaaactgaaatggatggtggttgaagtacagccaactcatggtggtccaaaagactgtggtgaggggatggcctcccaagaggcagggattgagccctacactgaccagaaatcactgcattacagaataatggagaaggcaagacaatgaaactgagtttctctgaaagcttggcatcttggatatttcaaagattaaagttgtatttaatgggaatcacgtggttcaattaactggtaataggatggatcagtgtccacctctaggacttcaatttgagtctaatccaaacacagaagcagagtaggttgaagcccttggtaatgaacactaagcctttcacctcccggtccacagagaaagttcctctcaggccacagaggcctgctggcaattttcctgaagacagtttggtagactatgtgaaacaagtgaacagctatggtcacctgagaggtagtggtactctacattttcaaaagttctctcccaaagcaaaaccatagcaaaaattgaaaagcagtaaatgaaccatggatggagatattgcactatgcacttgtcttgctagcagaagaatgcaaaggtgctttcaccattgtgtcagatgcttggctgaacatttattaaacttttgatatggaggaagacatagaacataaagatgcattttcttccctcacaatgctcatggtgtgacaggaaaaaaaaagaattgttccattaaaaaaacattgaaatgaatcaacacaaactgatgttattattgaatagataatggagagattgtgggataattagagaataaatctggttatcaaagatgtctctggaaggcacgtgtgtaaagttgttttcagctctgtacacctgtgcacactggccaggaaagctggaccttctgcagagaaaactgtcttctccagataggaaagtgtgcctcattgagctttgggctaggccagagctagaagatctttcctgtgtttgggtcattcctagatcagtgatccctaatgaccagttccattccctaaagctaatgttgactctagatctttctgacatttgattcatgctggaatccatagtttgttttgagtcaggtctataatagattcatattcctgagaggcttcctattgaaagtgaagactcaggattccactgactgttctgccactgtttaaggacgatattacagttggattatagatgacctccagtggacacagaggtgcttagattctactgagccaccattactttgcctaaaagaaaataagagggtcaaagggactaacttttgtgtaagttttaaggttttattcaaacacaaacacacacaatcacacacacatttacatggcaacatatctacaaataactatttctctagcattatgttcctcagcctcttgaatgacatcatttaccttcgtcatgttaatgaacaaaattgtagctcactcataaagaagagagagaagaatgtttgtgccctttaaatgtcaaaaaataaatgcttcttcatattgtgtatgagttcactataaactcatggataatttgtgtatctgaagctctgaccggcttccagagggcttacagtgcctgccatatcttaggggaacaatgacctcatgctgttccagggacatttctatttctccatttggctgaaacttactcactttatactttggtagggatactgaattcaagtaaattaaaattaggagatgtgttctctaattattctatcgaaagagcacatagctttgaaataattctcaatgctagtatggtggactcttttcaaaaggtatgagtcagctccctgtgacatgttttccagtgtctgcttggggtcacctttactaatttcatcaggactgagggaaagcactttccttttcatatttctgcttgggtgtccagatcattctcccctacagaggctttgatgctgtcatggaggtcatagggccggccttttttcgaagtactggagctttttaaatttcactttttaaaaaatttttgttgcttttattatggtggttgggggtaagtaaggacccaccttttgaattagaattactgatcttatccaagagagaatgttgtagtgggtgatagttgacgaagaagagaaccataaaatatcacctggatgaaagacctaactgcagcactatctccaggacacacacacacacaccagagtccccacgtgcagacaggcactgctgatatattacagtctgttggccattttgtttatgataactaggaaaggaaaaatgagcccttatttcagtgtgttcatcccaagatgatgacacagtagattccccttgcaggtaaaccgagagagctcagttaatcaccatttatcactcaagtgactcaagtattttgcagatgcattggagccctggagactgagatattcattgggctgcaatgctattctcttttctcattccatctaatataataaaataaactcaaatcctaacatcagagtgatgtgtgctatcttttagagtcccaagcctttaaaatgtatttgattcactcccatagaactagatacattttccaaacgaaatgtgatatcattacaattttaatgacttataactttgctccatctcctccattaccagactattcctagctactaccatcttttgccagaagcctctaatttatttctctgcatctgcagctgacctccttcaaacagtgttattttgagttgattttagtatataaaccactctcagtgggatctaagatagattagtttatgcctaattgagtgagcttttgtagatcctcttattttatataacttattagaaaatatctaagatatattgttctatttgccaaataataattgtgaatcaggttcattgtacactggttaccaatatgcctgagcctagtgagagagaacacccccacacacaagtcacatataggcagtaaaggacagcagaagctggggaatcattttgagctcattctccaaggctcaggaaagctgcctatggcaaatggaatccacctgtgcacgtactgcacctaagggaccttggaaagtaccccactctgggttttataccccaggggcaatatgactcaataagctgaagtgttgaaggacatcctgttctggtaggaagtggaacagagacttggctattccagccagttcctccttatctgagaatgttacatttctggtatattctttagttatttttgagaactacaagtgagaaaagaacacaaaccaggttggtccgaggctacctagagaactttcttccaataggtgaatgagcaggtatgttacaggttcctcatttgatcctctcaccctatttgagttattctgaccacttgtacatcaactattgattaaaatctgaaaaaagaaaatcataggtgaccttaaattaaacttaaattaaacttaaaaaaaaaaacttaaaaaaaattaaacttaaaaaaagttccacaacgaacaggggtcagcaactttttctgtaaagggccagaaagtaaatattttaggcttgtaggccacatgatctctgttgcagctactcatgtctgctgttgtagcatggaagcagccaaagataataatacatcaatgaatgagtccagccgtgtcccaataaaactttatttataaaaacagggaacaattatatttggcacacagtttgctgatctctgctctaggccaatctatctcctccaacttttgcatattcatacctcaaacatatcataaaaaactgccacaatctaaaccgtattatctgatgaccctaagtactaaatctctccattctgaaatgtgtatattaattttttttcaggtagagaatggtatagaatttagacagggaatttatctgagggattgactgaaaatgccttacttatgaaaaaagagttcttggttggtgtttattattcatgtaggtccatttaccttgaagccataatgctaatatagcctgtcatttggaagttagataaatagtaaagcactttaaagaatcactaaaagtttcctcacaaccacagaataggtcttggagggttactcacgctttgctgatctctcatttatagaggagcagctgctcatttttggcctagaatatccacctctaagagaagaaatttctcctttgcatcctgttcagagctgatcatgcatattcttggaaactgactaaaatgacctagtctgtagtaaagtaactaatttagagttgggactatcaactaatgttattttgccagaggagatgaatgaaaagacttccttagggactagcagcaatcagtcagtagggaacagggttaccaagaccagatggagaaaatggcataggacatgtgtattagacctgccactttctggctctgtgagcatgcatttcaaagtttatacctgcaaagtgggcatttgacagagtaggggacagtcggagagcttatcgatacatacttattgctctccttgtgttctgtttgctggaacacaattttagatcaaatatttaaaaattcacacgtgcgtgctcatggctgtgcactcatgtgcatgtgtgcctgttgtgtgcgtgcatatataccatacagaaaagtactgtctggagaatacattagactatgcatgtaaatgtgtgtagaatgtttttcttttttttcatgcaatacatgctctatggatatttgttaagtgactgaagttttgcactccctggtgcagtttctcaatagtggcactattgatattagagccagctatttctttgttgtgtatcattgtatatttagcagcatgcgtggcctcgacccactagattctagaagcactccacttcagttgtgacagccaaaaatgtctccagacattgccaaatgtccctggagataagcatccctgttgaaatcactgccttagtgaaccaagacattaatgtaagaaagtggttcctaaactttagcatctgaatcaatcaccttaagttcttgtgaaaatacatgttactgggcctcacactagagtttctgattcagagggtcttgcactagcactagacccaacaatttacatgtctaatgagtccgctggtgatactgctgctgggggtcttagaacctcactttgtaagcacataagtaaggtgtaagatgttctggaaaaattccagatgagttaaaatgtgtttcctcatttcaaggactgtaatgtttgttgttagtgtgagcacagggcttaaggtttctttatgaagaccgctgggtggttcctcacagctgtggttgagatttagcggggaaaccggacgtttatgggagacgttcagtctgtactggattttagtcagcactgccctgccagctgtcacctgagtcctgccaggagactgctccaggtcttggcacagggctggggcacctatggaaatgaacttgaagtttgccttgcagtcaaacttaactaccaaataaaccagcatgacattggggtctgtgaatgagaagtggatgttccgagtagatttgaaggacgtgatgactcaggatgccagttgtgactggtgacttagagccgtggtagctttgacttgcatcttatttacttgcatcggctgtcttgtccttccttgcttctcgccttttcaggtcatggttcctgatgtcctaagctgtcatccctactctctctctctcttttttttttttttttgcttggagtcagagatggagctgtctcgagctatttatcagtcttatctctctgcgccctctgttagcatttcagactgtggatctaatccactttaattgattgacctcgtgcaaccagacatcagtaaaacaccaggtgaagcacaactgcagccaggggagaggtggatgtaactttcctggttgggtgcaaagttcgctgaggcctataaagatttagaaaaggagaaatagttttcaagccatttaatatgaattttctagggacaatgtatacagatcccagagtcgatgaccttgactgggagacagtcgttgtaaatagagcagtatcctatagggagtgtgcaaatgcctctgactcacctgtcatccatattagtactatttctcagctagcatcactattatcaccatctccaaacccatcattaacatatttttacatcattgtttgtagataccttcagaatttgccaagattttatttatttctcttaataagtactatttaacacaagtattactgttgctcttgtcttcgttatcgtttttctagacaaagcttgagccatggatagttgagggacctgctcaagatcacatggaaaaaataatgtggagcctcaatcagtcccaattcttttgattctaaatctcaaattcttctagaacacaaagtagacattttcctctcccctgcttttcctgccacagccacacttcagcttctcaaggggaggggactgggtcattgtcatgaggtgatcatggactttgaaagatcttcaagctctacagccgtggtcttgtcagtttgggtgatttctgaaaggcatcttctctgatttagatttttcaacggagagacctggtctcttacctctcttgaaataccttaataatgaagtgcttactctgtgcttataaaccaacaactgtccagagtgtagaacaagaagaccataatgttgaaagagtagagactaatgatcttcactgaaagacacttaatagccacaaaaagagcgcaaattatgttctactgagttcaatgttttattctaaagaactgcagtaaaagcctctgttagtcaaagtcaaaattgatcaatcaggtaagctgtaactcatctttttgtattttacagatgcatttataaagcatagtgagatgttttgcctaagatttattgcacgaaatttgaatatggtagcaataatttattttatcctataatactgaaatcatatttggtctcttatggtacaaaaaagattcttctaatttttttaaaatcacaaccacacattctaattcatcatttattcatttccatatccattaatttaacaaacatttactgagctcatgttaggatacttacatttaaaatactcacaattaggctaagtggacagataagttaggcctacataaaatatgtaatatgtaacacatgtatttctgttatagaaataactcaattataacatgtaaaagctgtgattgtcgaaaatgcatggattttagagtcagacctggattctatttttccataagtctcttattgtgtgaattctcttgtaattaattgtaagaatttgaatatacttctattataaaaatatttactgagcacctattctgtccatttaggtagcctggtttatgttgcagtgacaaaagcctcaaacacttggtgctataaagcaaccaagctttgtttctcagccatctgcatgtccgtagcaagttggcttattgccatcctcactcaatgacccggaatgacaaagaagccgctaccaggagtttgctgggtgcagtggttgacaacaaatgagagaactctcgtgggtctcacaccagcaactaaatgcatggctcaggaatgatactcaatttatcagttaacactgttctcttggcccaacccatcacaacgagacccaaaagtcctctcttactacaaccctataatggaggagaactaggaaagtgtggtaaacagtgccgctcattattttctttactaggaaccagactttgaaatgggtatggaagaccttgctgtgcctggcccacaagaggcattatttacatattgccttccttgtgttcttgcctagcactgaactaacaaattctgtgggaagcctagcagttaagacactgagacctgcttccattgcccatatccctggcatacatttgaaaatcccagttctgtttctctcagctgcaattttctaaaatagcggatgatgcattccgtcttccccaggggcagtctggaatgaacgaagagatagccttcagtgacatctttattcctgagaattcttcttgcccctgagcatttctgctcctggagtctgaccctggtgtcggtagcatctcttaggtcagcaccaataactgcagtgtgactgattgaggatagggcagctgaagctggactaatttggggagccaggtgggcttataaacagtcattattgatgaagagtgacttactggctatttaaagacagctggtttctgtgctgttcagttttttttttttcctgaatgcacttgaggattctttggtaatgtcttctgatttaccacttgtttttgtttttaatatcaaggaagaatatagattgaagcaattgtcttggtagcaactttagtggtgatggctgtggagttattaaaatttatagtcatgctgtttttgcagctacactttgcatttcttagagaggcttataatatctggttacaaagaatgtagagagatagcaactaccaaattgggataggaaatcaaccctgcataaattgttttaatatatattctgtttgctaaaatttacatttattttcacaatatgtcttgatgacagtgcccaccaagccaactagcccttagctcatgacactactttcagttacactaatgaggagaaagaagggagaaagaagactgacattttgtgggtccaaaattatccacagtgaatgccaggtgcttcacatgtctgtgctctcctataaccctcacagcaagcttcagaggtaacaactggcccctctttccctccacacatctctttatgaaagagaaatcagaagtaaaataaccagaccagggtcatacagctttaagagccatcgctgttatttgaaccatgctaggctaaaacccacatttattctattgaaacagtttctccaaaaatcagagtgttttatatctgatcaaatgatgggtggttccttctcctgatctgttttatctcatatatttatgtaatgttttattacttataaagtaccatcatgttcatcatattatatcatccttacaacagccctatgaagtacgaaatgctgatatcctgtccttatagtgtattatcaagaagtggcttcagaaaaatcaagtaatttgcccaaggtcagtcaggtctgacaccaaagccaatgcttttgttccctcacatcttctcttttctagacacatgagccagcggagttgatttgcatggcagctgtgcatgatagtttcaagcctgggcaactctatgggtattcgccacaaggcttccgtgacttctaatgaactgaaacaaagcagttagccatggattataatgccaccgtggtcccatgacaaatgacaaggaggttgcagtaatgaaattttattactgcaaatagagaccacatctgagatctagcacggccacatttaccattgtgggaaacaaaatgaaacacctgggaaaggatctccactgactttagcagtgagctaacaggattaagaagatctcccagaaacactgattacaatggcaaatgtgtggcacctaagataaggaccaaatatttattctggcagagattaaatcttttcttttcctgaatcaaatatggatcttgcagaaaatctgcccaagaatatatcttgctgatcagcgaactcactgagccagaaccgtacttggccactgctgtcactgaaaagctacagaatgctgctttaaaggtctccatgcttcccctaaaactgttttccatccatgattaattagtgacttaggggtgaattgaatcaccagctgtcctttccatgcatccaggatttatgtactggtttctcattgaagaacagtggtgcaataaacagccctcatttgtggggtgggcagaggagtaatggtgtctgcagtcatggtttcttaactcctctagtacttccattctgctaagcaggttatggctcacattattacagcctagcttatttaggcatgagggtcgtgggcagtgacacacacacacccttagaaatgaataccagttctttaagagaaagcagaaaagtcatattaccatttctgaattccttgagaaataagaagaataaaatggacaataatattagctatgggcatgaaaagtacaaaaagaacccataatcaggttcatttatatatgcatgcatattttaaagctaggtgcttttcctagtgcagagatgtagatagcggtttcaacaaacagatttacgaaatcatgagtgtgtttagtcacaattttgggaggtacctggaactcttttcccagagaacagaacatggggattgcagacatcattttatattgcatattatgtaatcagggcacaaaggaaatactgaggtccaccctgtatctctgcatccttgaatgctcacagcctgctttggttgatcattctatattcctcgcttctaagatcaagacttctgcatgacttgtccattcttttattggatacaagatgaactgacatactaagtgataaatggaaacttgaggaaagccttcattttgggaaaagaagtgaagtgtaccaaactatatatagaaaccagtgtccctccctccagaactcttaatttgttgactttaggtgtagtaggtgcttaataaattttgtatttgtgtatttaatgaatacatgaatgaataaaacaaatgactaaatctgagatttagaaaaactcttttctatatcttgatttatatggattctggacttttctcacattcttctttttcttttcctccttctggttttcctccttctcttccttttacttcttcttgaataaaaaaataatagaagataacaaaggatcgtgaactagtactgtgactcagtcttgtagaatgtcagaattactactgatatggtttggctgtgttcccacgcaaatctcatcttgaattatagttcccataatcccaacgtgttgtgggagggagccagtgggaggtaattggctcatgtgagcagttacctccatgttgttctcatgatagtgagtgagttctcatgatatctgatggttttatgagggggttttcctcttttgcctggcacttctccttcctgctgccacgtgaagaaggatgtgtttgctttccaggcccccacagccatgctgaactgtgagtcaattaaacctcttttgttcataaattacccagtctcaggtgtgtctttactcacagaatggaaaggactaatacaactactaaattttattatccttgaatgcccaacatattgccagtaatttggaaaactaaagaaattgagcaagatgtctcccttctgtccttacacatgcctccaacaccctgcaatgctatgtctttccaagagcttaagagaggctgattatatttgaatagtaaggttacatttatttcatgtctcattgtgactactagttccaacttttagtcataaccaattattagagaagagtcagagttttaatagcattattatgtatgctttgtgttttagtgcacttcccaggaggttggtgatatcaccaccagcatcaccatttgcatcattattatctgtattagtccatcctcacattgctataaagaaatacctgagaatgagtgatttataaagaaaagagtttttaattggctcacagttctgcaggatgtataggaagcatagcagcatctgcttctggggagccctcaggaagcttccaatcatggcaaataggggaggaagagtctcacatgacaggagcaggaacaagagagacacagggaagatgccacacactttaaacaaccagatctcataagaactcactcactatcacgagaacaggaccaagggaatggtactaaaacgttcatgagaaattgtccccatgatccaatcacctcccaccaggccccatctccaacactggagattacaactgaacaggagatttgggtggggacacatccacaccatatcaccgtcttcactgccatagtgttactcttatctaattcattgcaatttcccttctgacaagtctttgatggccacagaggttctcttctgctgtgttgcataagctctggtcttgaatatatctctctttggattaatctgaggagtagggctacaagttgggaagcatggcagccatctaatcatgaaaattctaggtgagtttcattggcctctactggggttaccttttctatgtggtttggaactgcagaaccattatgtgcatgtgtgtgtgtgtacgcgtgtgtgtgtgtgtgtgtatatttatatacacacacacatatatccagcccctctgacattggctcctaaccattctgtacacctctgctttgccttgatcgcatgaaaatatgctgagaagctcatatttccactttaattgtaaatctgaattgataaatgatttaaggtccagtgtcttggtgtactctcttagtaaacaggcctaattcatctcacagaaataaactttgcattgtcattgcatagctactaggtagttccaggcctgatttgccttgaggggaattgaatgatgtaacctgtgcggtgcagcctgtgagagcaatttgggtggtttttatgccattggtttttatgctcaggatgaaagctcatggagaaatgtagaatgctattattatcttatcttcatgctgacagctccctctgggcacctacaggtttattgctggttggaggatcaagtttaaagggagagaacttcgtggttggtgataactatgccttttgtgtttctttattataggaacaggggaaaattggagttgtcttcaacattggcacagttgacatctccatcaaagaggagagaacccctgtaaatgacggcaaataccatgtggtacgcttcaccaggaacggcggcaacgccaccctgcaggtggacaactggccagtgaatgaacattatcctacaggtacatgttgttcgctcaatggtcctactctttttgactctcccattctcacttttcagtggtgatttttctcatgactgtcaccaaattccagaacactgagtgaagtacacattcatgatttttttgtatgagaagataagtcatctctttaggacttgatccagtatagggagcttctggagactttaccaactatgcactggacactttttgtcaacctttgactgatacagcctgactggctcataccaaagacaattacggtagattttgcagggcctgtagatgaggagcagtgaagggaaggatcatctctatcatgagctagtgtcgataatcataagatgctccatttgagacccagactttgtggtgccatttagtcggatgcagttgaaggtgcagatgccagagagagactctaaaaggacaattactgaacttgaagacacagatcaagtcatggtaacaatgagagaaaaactaaggtggaattttattcgtttggtggactttgctagtttttattttctcacttaccctaagcctgcctggatattcaaaggttggtcctagtagtcattttaatagcaagcatgctggtgtggcaggaaaaggggttaatcatctgtttaaattttacagtcaagaaacattcagcaacaaattcccagagccagatggctgaatcaagcacaacgggagaaaaggttgccttccttaaaagagatcattcaaataatccctcagctttccctcttgcctctcacttctcccaggaaaagtcctgaatgctgatcgtaaaagtgccaggaatggaagggacaacccttcagcaaagggccattgttccacaattgcactgtcatctgatggatgcaagagaatagtgagaatattgcacttctcactaatgtgggcatgaagtgatgtgctactctctatcctacacaccaaactcctcacaattttctcaccacttttctctaacttcctttacagtgaggtgggcacaataacaaagaagcttgaagcacattttcacatgtctaagagccattagctaataatggttatgcttgtgagaaagatacaaagtgaatttgcctatttgtaggccaagactttgaatggcttgaaggctgttgtatctccacacctaactcagcattaattttctttaaaagcctatcagaagtatctgcgctgttgggttgttccctaactgctagagtcccgctatatctgtttaagaattgtaagagcatctggaaacagcatgcaagacccccaaggtattgaggcaaaaagctccacccactattgatttgccatctcggtttccataaaacagccagctcagccattgctaggggtctcagaatttcttagattaaggcacataaatgcccttatgaggttatctttgagtatttgaagaaagccaaagctattaacagcttctaggaatttttatcattcaaattcactacacactaatagacttaatttttaaatgcttcctgcttaatccctgatggatgggggagagggtgaaaggaataaaagcagtccagtatcttaaaagctgttcataggctcatagaaaaaaatcaatctctctctccatatgtgttatcattggccttgctagtgttgctgaagggtttgttgtgtttctgttaggaatttcaaagatttctaaattgatgttaaccacttgccttgagccaatatagaatctacaagtttgctgccagcaatgagcaggctctttaatggtcatttttaaagccacagctatgtaaccaaaccggagattcttgctgtgcgcctatcttttggtgtctttctttagttccaaattatgggttgcttcctatatgttttcaaaacagattaagcctttctttaatagcattgctccctcctgaaaactattattatcattggaaactgttatttagtaacgatatgtgttattatttcaggacagggtacagtatagcatttataagtatgggccttggagtcaactggctagagttgggatcttggtttcatcacctgtgagtctaaagaccttgaaatgtcctaagcattgaaatatttggtgcctctccccacatgtaattcaaaatacagtaacactgaaccataaaataagtgtaagaatttctaagagtttttatttttctcctctgatgatttctgtaatgctttcaaaatatattagattctttcttcccaaattctcattttgtactttctctgttttgttgttctttaagaagatgttcattcttctccctgagactgtttcctagtctagacaaccagggtaatgataatacctggttaatgtgaagattaagtgagttgaccacatgtataatgctgggacaattaagtcaatcctcaataaatgttagctgtgaggattaccaatcatttggctagcattttaaattaggacatatttttgagtacagatttcttcattttgaagatgaaataccctatcaattagacaaggtagatattttttattctccatttcaaataaaaacagagacccaaggaggtgctatgcccttcctaaggtcacatagcaagtgaaggaagacctaggacaagatttttctgtttccaattgggcagttttcactattgctcccccagagaattgggggatgttctgaaaaatgcatagctagaaatgagtatttttcttcttgtgtcatcttagatttctttctttaaagaagtgtcatatctcaaaggtcactttccaatgatcacacaaaagtggttattgtgaggtgttgagttcaaaatcctcatttaaaagttttattggcaccagtgaccccaagctgctctccttacaacaatggcaatgtgctcccatgaagcagctgaaagaatagtgagtatttaaaggagctatatccccttaccttgctgcctcaattaaaaagttgttgtgtgatatactagatcgaggtttatgttccactctgccaagacttcctaggagcggttcactttttgagccttggataccttattttctctcctctctgcttccctgtgctattaaaaggatcaatttaactattaataatttaaagtatcatgagaaaaatctggcaatgtttattttaaatcataagatcaaaattccccgtgtctgggccatcaaacaaagccatcaacctggcaaggcagtcttgacagtttctacaaaaatgtgtccttttgttttctaaagtcattctattttattattttatcaataacagtaggtttagaaatcatcaagggtttagtctcactactcacttattactaatgtttaaacagtaaagacatacagagtagctcctatagaagatttatgttaagttatctcacttggagaacatgctctcggggaattgttcctgcctacaaggtctgaatgagtcagctgtgcaccgggatgaatgggtcatctccacagtcttctcatgggcatttatggggctctactgaaacatcccaccgtgaaatatttagaacccagctgggcacagggcatgtagcactggctctttctttgtgaatcagggaagaaacagaatgaaaatagttctatagcaatcggaatcttatatcactaaattctgggaggtagaactgaaaagcaacttctttctttgaacctgaaaatagaaaagctaagaaacaggagagggaaataaaagaagaatcagcccagagctatcatccaggcactgacaaatgttccttataaagtctctgattgttgtccctatacaatgcggtggtaggaacaagggagggggggtgaaaggtgacttgagtatgaggaattaattttagccacagctctaggccccctggaaggctgagctgactgggtttgttccatatcttctctctgctgtgagtgggtggccggtgatactgtcactgctgtaagatccctgagcatggtccagtaaaggcttttcaggtcctatctaggcttcctgggacatgcagactgatacacagcttcaatctttgtatgtcagggggtgctgaggagagcagggcataccaactcagttcaagtgctcttcacagaattcctcttcttcagtctttaaaatgcacacggatgacctacatttaaatcctatttgaccacccaacttagaacgtgaaaaagaggtaaaagtagctccctttcaaggatgctacattagaaaactctctttatatttgagtttgtcaaattccacagaaacttgtctttataggggttggaagagaaaacattgctatggtacttataaaacattgctatagtacttattgatgaccaaaataccttcatatcggttattacatttgagcctcactccatcctgtgaaggacagggtttggtattattactcctgccatacccattttaaggttacgttatcaaggctctgaaaggctaaataactttcccagtgtcacacagcttaaggagcagagccaacacttttctatcctgatcctcagactgcacagcctcaaactttctgctcactttcctatttctcagagccacgattttattaataatgacagtatttctttttgtaaaaacatattctcaaatggaaatctctgcctggagtagtctagttagtaaggtttttcaacctattgacatttggggctggacacatctttgctgttggtgtgtaaggaagggggcggggtactgttttgcacattgcaggatgtttagcagcatccatgacttttaccccctggatgccactctcatgtttccacaagtgccaaataccctctggtcagcaaaatcacccccatataagagccgctgacttagagaaagtttccaacatattttgtttaaatgttcatcatgtttttgtaatttagacagtatacatcggtataagaaagattttttttttgtccacatctcttcctcaattattgagactttaaaggattaaaaacaagtctatgtacttgacatgatgctgaaatttctcaggccttgggttttcattaattcctagccaggaggtttactttccttttctttatgtcttttcctgcgaacatttgagaccttgccagatttgaagcatgcattaaaacaagccccatctacctgctcattcatccgttcaggactagcgttgctttcagttcaacagggggaaaaacagagagagcagagtcctgcagagggaataagaagtataaatacaatcaagaaggaaagccatatttgaacaaggtttcaggactacagacatataagggcaaccagagaaagcctcacttaatgaatgtgtttgaacattgtgaggaacattttaaaaccatcttataaagaaggtgctccaacattcagtcacaaaatgtatcaattaatcactcaaactagtgtatcttgaatattcacactgctaactagtcatcctttccaatttgtcagaaatgaattaggattcacatgtttgtgagtttctatttccaagggaattatttccacattatgcagtttgtcttcggttaacaaaaatgttttaaaagaatgttttcaataggcacttatatatacatatttgtgtaaagcaatggtctgcaacctggctgaaattgagaatcccctgggaagtttaataaattgccagtgctcgggcactggtctcagggcatctaatttaactgaactggggtgtggtccatggatcagcagcatcagcttcccctgggagcttgttaaaaatgcagactctcaggcaccaccccgtacctgcaaaatcagatcccccagtgctatgggtacattgtaaattgagaaacactggcccaggcatttttttgtttgttttttgttgtttttaaaaaaagctcctaaggtgattctctgtgtagctaagtttgacattcactgatatgtagaagctaaaaaatgtgtctttctttcagactgactaccggtactgttcaatgtggtagccgccaaccatatgttgctattgagcagtgtggctggtatgacggagattctgaaatttttgttttattatgtacttatgtcctaggcactgaaggctttaaatacatttctcattcagtcctcactccaacactatgaggctataggttagaggctagtattagccagtgcaggactacaatatgccatcttttatttccttttatgtgttttctaccatgtaaacgatgggcatttgccttcatgtaccttctgaactcatctaatgagttttgatattatacaatcacagggataataactccaccctatccaagcagctgttggagagtcattaaagggtgatgattaagcatgagggttttggagtcagactttctaggtgtaaccaagggcccctggccctgtcacttgccagcttgcccacaaccttgagaaggttcccgctgtcgagaagtttctctatgctttgatctccatgatcatatatatgcattttctcgcattaaaaccaagtgaatgctcagattgacattactataggacacttcacaaaaaaagaaagtactggctagaggtatgtttcctaaacacacatggcaaactaccctttcttaagctatatttgtatgctctgacagcatggctatggtgcaaatctatcaacaaacttgaccctaagaagccagttacatgacctataaaatggggattgtgttcattgttctgtcttagaaagtggaaagttctttgaataccttaaagcattgcatgaataataattgtacctgcaggtgtattgtctggattatctaccacccgtatacattttaggaccattttttatcttgactttctacaatgaagtttacttatgaaaggtgagaataggggactaagagattttccatcttgctttctcatccttcatggagaattccacaatagtagaaacggttccaaagtgagggacatgtgcactgaataaacactttctcccagaggtgtaggaagtggcagatggtgccattcaccgtctctcagccaaactcacccaggtggtgatggctgccatttgccgaacatttatgacatactccccacttcatgggcagcatcctacttagtcttgaaaccacccattaggacagcgttggtcttattcccatttttttagattaggaacagtctatgggagtgtagcttagtttgggaaatgctggtattcaacccagaaccatctgacttaagagtcttaatgtttaatcacactctgctccttccttagattctcgtaaacaccctagaacagttgcatatcctagaaattctgggtttaactcaaatcttgacaatttagaatttttctctcaagttaaattatagaattcccccctcaggttaaatctctgatttctgcccagtctagaagtcagcatttccttgggcatctatacatatttggctttatctatatcatcggtgtggcctctggaagccttgtcagcctctttctttttgcgatcttgttttaccttctagtgccatatctatgcaaaaagaaagaacttttaaatgaaggtttgttttgccatttaatagtcttgcttggggagtgacagagtggcaagaaggtgcttagtatttttttaatttaatttttgttttatcaaggaaacttcctttcttctctgtgaattcccagccacagataaacaggcttgtatcttataagttaaatacaattactgctatcaaacctagagcctttttctctctcccataaatgtctctaagaagctgataagcatttcaaggcaaactggagcttggactaatgctaaaattaaacataaccacccagaagacaaagagaccagatagaaatacataaaacatttgaggtggtgggaacacatggacacagggcacatagaaacttgcccccaaaacattaggttaatacatagctcaaggttatttataaaggaattaacatacacaaaggagctttttataattataaggatttacatcagataataacaattgtagtagccaaagatattatttatctagaattcacttgtgaacagggcatgcttttggtctacagggctgttgagcaaaagaataattttgctgcaaccctctgtaggactttataggatgcacatttacattttccccatttttagtagactatcttgggatttaaagaagaagttggaattttaaaaattagaaagcacatcatatttatttagccatatgttaaatgttataaatattatagtttagggactcagtaaaatgaataattaaaaatttgagggtcacttctaggtacaatgtaaccagggatgtaagataaagaatttcttgatttccaaccataatgcatctattttaattaaataatatctttcaagattagaaatacagtgtagtcacactttatgggatttttaaaattatacttatctgaaatagtgtgacataaataaaaatattaataacatctccctctatgtgaggcatcagtaataacatacattcttctgaattaaaacaatcatcaaatattgcataatttcaaagctggttagtgaattacaagttttgttttccctattgtcacatggaagctctagtttaagtagttaatacaaattctggcctgcagaagttgtctctaattacgaaaacttagaattattatcccagccataaaatacaattaccctgtaccgtttttcctctgccccagagctgcctgaacaccaagtgtcctaccacccatacaagagcatagttttatttatgggaaaagtttccaagttccagtctcttcaatttaaattttgcacaaggttgcagagtctctctagttatttaaagtctaaaaagaacactgagcttctttgagaaaggtggtacataaatatccaataataataatatatattcacatacagtatgtcatttatacttctataaagcagagaaggtaatgaaaggtgctctatactgtaaatcactcaatcgattgtaatcatattgcagctcatctcaaagagataaagaccttccactcctctaaaatccctgtcaatatcctagcaggctgaagagaggggaaagggggtcagaagaggaaggagggaatgagtcaaggacaaagcggcactttgagtcttcagttcatggagttaacatgaatttgattggattcccagtgatatttacagttttctccataagatgcatttcttttccacacggtacttttacagcctttcagtaagtccctgatgctctgtgttggccttgatggcatagtttactaagtgccaatggtagatatatagcacagcataagaagacttagggactaagtttataagtagcaaatgtcaattcgacagaacttaaatgctgaagtgtatatcaaacaatagaagtcgattgatcatgggctagcaaaaaatttatattgcactttcaaacagcagaaacactgtaaaaacctttttactaactgctgttgcctttaatgtaatagaagtattcccctatcctcatcaccggggtagctctgagtggagccatttctttatgcacttattcattcaccttcattcactattcaacaaacatttgttccacatctactttatatgtgaattcatactaggtgatgggtatatggtgaaaaatgaaacacagctcctgacctcaaggatcctcaagtgtagttgaagagaaatacaagtacacaaggaagacatttttattgagcagttattaattgccaggtagggtactgggttcttgtatcaagtctttgcagtagccccaaggggtagatattactgttatcatttcacaaatgagaatctggagcttctcctagggtcaagctagcacatgaatacctggaactgaagcctgtatgtcttagaaggcaaacccaaagctcccgtacgctgccctatcttgaacctacaattccacaaagtgaaagaaggtgctactattgaggtgagatccaagttcagtagcgggtacacataaatgcctaatggagcctgaagatcagacaggggcgagcatggaatacaatttgggatgtgaccttgaattatctggaacaatgccaataagctctgctcccctacctagtgtgaaagatgacatgacaacttatacctttctcattgaggaaattaatgaccatggaattctttcttttacttaaattttttttttacagttttattgagggatgattgataggcaaaaaaatcctgcgcatactttgatgagtttagacatgtgcgtacacctgtgataccttcaacacagtcaaaataaacacattcatcgtaccttattttacttagtgtcatctccccagtggttccaaggtagaagtattaatctccctcatttacagatgagtaaaccaaggttcagggaggttgagcacatttgctgtggtcactgtccaccaagggtcaactctgagattccacacagatatgtttgccctcatttgccctcacaacctaatacccaggttgcccactccacttttccaatgtcttccaagagcactccagtttgcatcatctacagagctcaaattcacatggttgacagatacaaattcacatgcaaatgtactattatttcctacatcccagtgcatgcagaacactgtaatcccattattaaacatttactagaaatgtgcttctgcctgatgcacaattgccagcctcaatgtttaattaaactagatttgttttcattttaatcacattagagaaatgtgtttttctcagagttcagtggtgaaatcttcattccaaatgcctccaagtgactgaaaactgtatatcccagaggaagggatgagggtattacaacctatccttgcataaaatattttaggggaaaaatattaattaataacaggtaagactgggatacactatttgtttttgaatcatcatagcatcctggaaaggggtcctattattattattaccattttagagatgaggaaacgaagtctgagtggttaagtaacacactccagtgttgcacagctagtaggtggcagaaccaacatttggatgtagacagggaaaccctgatatctttatttagattagggatcaccaaaccttttcccccaaaggccaaataacaagtagcataggctttagaaaccaacctatcttataaatataaatatatttagatattaacttcaatattttattaatataaatatgatatgatttgcatgatctttgttgcagttattccagtctgctgttataatgcaaaatctactatagacaatacataaatgaataggcacagctgtattctaataaaacttgctttacaaaaacaagctgtgatgaaccacgtttccccattaggtttagctgggggaaccctgatttaaatcacggatagttggaagcctacagcttttactaatccatcagctttattttttgaattgtcttatctgtttggaataaagagagcaagagtatctctaagtggatgggttaaatccctagagagacagagaatagtactaccgtgtagggtgacatagacctactggtgaggttaattcaggataaagaaataaagagatacaatatgtaagaaggacaggcactccatttacgtatagttaaaaatgacaaacaacaaaatagctaaataccatttttttaattcaacaccaaagacagacacagattccattctagagcaagatttgaagatgatggacagaaagcattgtttctttacttctgttacttctacttaataagccgtggtgatttaaatacacccctctctcctaaaaaaatagtgcttacttttcttttaaattcaagaattttgattagccaccctagcctatttctcatagcccttatgcataaaggtgccagttgatgccttgcattgatctttcttttctcctacccgcaccctgattgatatgtctgtcttctaagtcttagagagcatgcccttcattatctcagcattggttgtccctgtcttgctgctgagagcttcctgcttgagcttcagttccattttcaagccattgatctgatgttctgaggatggactagcccactttagaggtggctcagcccacttcatgctattgagttttagagattttagaatcagatcccctatttattaaagcagcaagaccaggctatcagtttttatagatgtgcatatgcctaaaaccatgtagtatttaaaataaattttgacctacatcctctattccccaccacgcctggtacccaccattttactttctctttctatgtatttccttcacttttattttttgctttttggattccaaaaagtgagattgtatagtattttttttctgtgcaaagttataagggatgaataagtctagagatctaatgtacaacataaggactatatttaataatattgtattattatatattgataatttgccaagagagtagattttaggtattcatacgacaaagaagaaagaaaggaaagggagagaaacaatcactgtatgagatgatgggcatgttactttgcttgactacagtcatttcagtgtttatatgtatatcaagattacatatataccttatatgtatatataccttaaatatatactttttttaaaagccaaactaaagcacactgggtttttatttacaaaatagggacccccttcacagtttgctgacctcaattttgactccaattaagttatcaaagttctaactaccagaatagaaagcatatactgccagatttggccctatagtgcaagaaaagtggtcacagttttcttaatcctcttttaaaaaggaaagaaacaaacatagtaggtaatcagtaaatattaaactgtacaactgaggtttttggagctttctgacttcaatgactgcatatacacaacaaaaatataagttgttatacagcatccttgacaagcattaactataaatacttttataacaaaagaaaaatatcatttactacaaaacttttaagcttttgctttagaaatgtttctttattgaaacaaatatgattttattgaaatattttttatattagtacgatgactctttattggtctcaaagggtggattgccaagtataattaaacaaaatgataaataggaggaagatttcagtatccttgacagaaaaatacatataaatctaatatagatatatatgtaaaaagtaaatctaaaatcttagccaaggtttagaaatcttattacttcatttttatacctttataaaactgttgcgaggtgctgtttcaaataaaataaaaatttatgtaagtaaaatacaagctaaaatagaactgaaatgtctttaggtttacaaaatgaatagctggattagtttactgaatttttttctgtggtatgggtggcactggatctctagaatcggtaaaaataaaggcaatatattgttctcagggagcaattgagctctcctagaggaggcaaaccaagtgaaatctaatagttttgcttcattctgtgactttcccccgctatgacctcagaattttgagctacaagtaggtctataaagggaattttggaatactcttaatagatctgttcttgaaataagtcagctaaactgagtgaggtgctttgccaacacattaactgaaagtcctgaccaaccctgatcccagaccttcatggacaattctcttgttttatttccatttccagtagttgtatgtaattcttctaagagacttgttccaagccaaccttcctagtggtcttgttgaaatgagatagtggttgtaggtatcattgatgaacacataggccaaaacattattgaactattcagaaagtaaatctagcttattctgtggctgcataattatataactgtagctttctgtcaggttacagtggctttaattttctgatcaaataaaacaatcaatataattgtactttgttcctccctcttctggcttcgattctttgatttgtgccactcaccactctcattcttccaacctccccctactccactggcccctgcagctacttagaatagctagctgttgattaaagggaccaagagtttgagcagttactgtatactttcaaaccccactgccatttggaagtgaagtcccaactgacatagccaaactgtaaggacaaaagcaactctaatacctgctttcctttgtttatagcaactgctcaaattctcctctaaaagtattcattaagcatccttctctataaatctctgtggtagaaactgaataataggacttgaaccattattcaatcagaccaagtttaaacccaggttaaggaaagaggaagtctacacgtctttgctgctcactgtgtttagtatatatcctctataattcacaatcaaaagtaaatctttggacagcattcttgtttgggttagaagaaaaatttcaatccttgttcagaagtctaagcacttgtgaggattccaatatgatttttaaaggccaccatccctgatagtcagaaataaaaacattaaaccaagaagactgcaggctttcttctcacctgtccatctcttgtcctaattacaccttatacttactaatgttgtaagtgctttttgacaagacagcaatggtacatcaatagatactgcatgaacttgagtaggcaaatcaagtcactcagaggccttcttttaatctcttggatcattattgcaaagataaaagcaggtttctgaaggagtgaaattcaaaggaacctagtaattagaatggtgaaaataccaggtcacccggtccgtttccctgcttggttcagatatttctaacaatatgtactagtttaattttattcatctaatttaaaatgagagactttatctttcttccaccaagataatatatctgatttctcctctttggcttaaattttttttttcattcacatcttttattattagggttgtcagttgaaattattttgaataatttctttaaatcatggatttttttcttacatctcatatctaggagctatttcttgttgcaaggtgcaaggttctatggcacatacaaaagcatgctttcatttgggatatttataaaatctctctatacacacacacccatcaatgggcaaatataaaaagtattgcctttgtgctagcatgtagttaatattcaatgaatatctttacacgtaaaatcacctataatctttagacatgttcctcagatagccaagatttaatattacatataaagtcatatgaaatagcttaaagaaggaagaggcattgttattttatgtatatgtctcaaatgttataaaggttataagaacctttctgaacatcgaaaacttcaaagctaatagtttaatagtttgttggatacctgccatcttttgaggtggccaatagttgtcaactttttgagtatccttgagcactgaaggtatgtcaatgtttggtttcattgtgtgttaaggagggaattatagaagtagaatggagtaaaaagcttaaaaaagaaaaagcactgcttctaaggtgattctaatttcataggaaaaaaatactttaaggactaatattcaatacagagtagcggaatctgggtgccagataaatatttaacatttgtggataattttacataatcattggccactttcttaaaagtgttttttaaagccctaattttaaaaaatgctattctggccatcacatttacaatgtgaataatatttgagtcatgacgtaactataagttacttctaatgattgactgtcacttgagttgtaaatcacagcatttagcagtgctagttgtccttacttttggtaaccccttagtccctggatcttgatcattttggggtctttactctagagtctatctttgctctagagtctagctgccattcacatgctaaagaaatgccccttaaatagtacctataacatcctaaggaaatgatttctaaactcttctcaatgagtttaaaaaggctgctttttgctaatccataaactttaacaggggctgaagaggcagtgcctgctttttaaaaaccaatgttgcaggctgggcgcagtggctcacacctacagatgcatgcctatagtcgcagctatttgggcggctgaggcaggggaaggcgggaaaattgcttgagcccaggaggtgaaggttgcagggagctaagatcctgccattgtactccagcctgggcgatgagagtgaaaccctgtctcaaaacaaaacagaacaacagaaaaaaaggtaaaaccaaggttgcaaggtaggactgtttgtgtgtgtgtgtgtgtatgtgtgtgtgtgtgtctagttttgatctttaatgagagttttggtttgtttctattgttgtgtgttagtagggaatgtggtggaggagtgcctttctagtctaagtatacgtaagtgtattcatgaccagtattcaaagggtattcataccctgcagggacataaatggttttgttttggaatgttagggttaagaatgaaagtgatggccctgtttgctcagaaaaaaaagaaggtaatccttcagtgctctctgtgaaatcatgtatggaatgaaaaaattcattgatggggtgagaggtctcagtgccagcaagtcttactagtaaattcagaattcagcctgctgttcctagagatcttcctctccactcctcatccaaagagtgatagaaggaggtcagataagtaggtccttgtccctttagggagctacttaactctactcattatcgtcttggagtcaatccccacctcattccctgctcttcccctagtctgtgtctagaatcaaggatcagagaagcatcaacacatgcatcaacctttctccaattttccttccctttcccaactccctcagccttaccctctcctctcaggaactgcattattgcatctcttcttttggatttggtaattctttccttagaaagaggaacagggctaaggataggcaacaggggcccagctgtccatgtctccatccttggacccctaagacttttgccacacaaactcctttgaatctggagactgcaacggagctgcttccctcctcctgctgagccttcatggaaatcctcataggagatagtgtttcctttacccactctcggacccctgttcttcctggatctcctgaattcctggctatatcatttaggttcgctgcattgcaaaccactccaaaatttccgtggctcatgtgagtgtttttttctcttctgggttggcttggatggagctagatgatcttgatggcctcatgtacccctctggggtctcagttcagatagccgagtaggttcacatggctgggtttcttttctcatggaagttcacatggcaatctcaggtgtaggcagcaggcaagggcaagcattcatacacagatggctcttcaagcttctgcttatatcacatttgctagtgcccatatgcccaagcaagtctcacggcccacccagaaccccaagggtgaaaagatagattcaaactgttatgagaggagtaagagtctcactgccaagagacagattttgaaatgggattgtagctattttttttttttttccaatttaacacactggaaaagaagaaaggctctggttctactaatcatatttccctcgtaaattttctccttccaaccctgattcaggtctcaagctgtggttggaaatcagtgactttcactaagggattgtcctttcttttctttaggacatggctttttgaaattaatcttgattctttctgccatatcccaagccttacatttttttcctttttttctctatgtctgatcattttgctttaagtcaaattgattttttaaaaattaaatgcccattaagaaaattatccacattcatgttcccttggatgctttcaaatattttattttcctttgcttttggcagttacaatctatcagtgttatttgtaaaatgtcttatatttgtatagggtatgttctccctttcctcttttcttcttttctttttaaactaagatagatgtgttataaaacagcccccatgctgatccatacttttctctagacatttctgtgagctcagtactttgttgtttatcattatcctttgtttgtagccagatttgaggccatgttgcagttctcacaaacaaatcaatttgaattaatttgccaagtagaattaacgaggcattgtatgaattcaagacatactacaactacggcatcccctgaggttatttcttctctgggaaaattttgattcttgtaccacattttaatagtgtatatctgacctttgaatcttgcactaaatgatacatggctgccagctggtttaatttttgagaagccttaaaaattctatgcagccaaacaaataggagtgtagacaattctttaattattaactttacggggagaaagttgtcttcaagatcgatactctctgatgcttgcttgttgctaggagttctttttctaatgatgttctaagcagaagtttgagaaacatcaaaatagagaatatatatttcttagatggtctttgaggtctccacaacctaaaaatgatgggctccttctctcaaattataagctataaatcccagcaaactctactcccagaaactgtttttatttaattataaaatgggaaagcatttactctaaagagggaccatggtgattacctgaaattccttcactccctaaatggacatctacatctgtcactaatatattatttagcaaaagaatttccttcagactatgatgaccaatgcaaacaaaataaataagaaaatccagtcccctcccacccctcacacggtgaggaaatggtaatagagttcttcaaagaaactctaatttctgggtcttagatgaataacattagaagtgcttaaggaacttgaattctaagcccctttaatgttcgctcagaaataattaacaggagccagtcagaatagaaaactagtctgggaaaagtgtcctaaattttacactgtataataggatggatctcttaaactcgggactgatatataaaacttctccagtgtttcatttgaccaaaaattggcacacatttagctagatttaaaaaagaatatggtgatggctgagaactaacctgggctcattaaaaaacaaacaaacaaaaactcacgcatgctagtgtaactttctcttggatagcaatagcaaattggcaggtgaggaggatattataaataccatgcacagtgtatcttcatttccctaaagcagtatactgtaatgtacagagaactatgaagggatcttaaagagacctgcctgtgttccatcatttgaagctttctggttacactgtaaagtttgaggtaaactaaaataataaaagtaaaatttattatctcacagtttctataggtcagaatttgatagcagcttagttgagtgattctggcttaaggtgtctgatgagttgcagttggtatgaactacggctgcagtcatctcagtgctatctagacctgggagatctgattacctggaaatctttcactcacatggatgttgactggaagcatcagttactctctggctcagttccttgccttatgtatgtttccatagaacttcttaagtgtcttcatgacatgagtctagcttgctcgaaatgagtggtccgagagagagcaccttttatgactcagtctctaagtccacacactgttccttctaccgtgttttactctgtagaatcaagtcactaagtccagcccacaatcaaggttgaagaatcaaacctcacctcttacacagaggagtttcaaagtatttttagatattttatagctccatcataatcttcctattcagggactagaatgaatgcacaaaaaatatgcttattaaatttgcagataacacaaagctaagagaggtatctcctaccagaaacaaaaaatcctagagttaaacattttcttaccatgtttggatgctgttatgaaacaaaaagaatacatttaatgagatataaatacctgttggacgttcataaagtatgttgtatgaatgcaacgtggaacaatttctttgggaagccattcaactagaaactggcttgagttttagttagaaacaagcctaatatgcggtcctgttatgatgtggttgttgaagcaacggttgcaaatcagtatactagtcaggcctcctgtgggtggtgactagaacagtgattgttacttttagatattttgggaataataaattcattcttaggcaagggggttcaaggatggtctaaaatgtctacaattttataaacactggcaattctataggatgtatacagaaggattactatgtcataagtttcttgagcatcggagatattaataatagcatgactttcctgttgtcgggatgacaatgttcctgtgttgtgcagcggaattgtcctcccaaacctcctccctgtcctctgagctgtgtggggacaccacatatgtatgtttaaatgaacagaattttaaaaaatcaaatattctggcattctggcttcaaaaaccttgcgtttgatgttctctacttagaaataaataaccaaacatgagaggaatgagaggagatggggatggggagtgggaggaagagggtagatagaaataaaaggaagaacaacattacagagaagcagagatgacacagagggtggacacgtgggaaggcctggatcacaggggaaagagtgagccccaaaataacactgtggcttttgcagcaaggaggaaataagtgataagaggaaaggcacctggggaaatcttgaagggatcatatgtcaaacggctgaagagcaaacattaaagctttattttgaaaaggatatttgaaaatatttgacaccaaaaattctgtagggaagtaattcttgtggagtttgccttctttttagtttaactcttctgaatcaggtacttgttataacaaatcatatattgagggattattttgtgccacagatttgcaacatgctttatatacatttccttttaattctcaccgcaatcccatgttgcaattattattacgatccccttttaaatatgaagaaactaaaacttaaaatgcactaagacatggctaaaactaagcatggttaccagaaaggaacaagacaaaattcagacattgaaatcaactactgtagcttcagtgcatatttcagaataattgtggaaggaaaaaaaaagtgacatttgaggaaagaaagcaaattttacagtcagtttatgttttgttaatttataacatggcctttttgagaggggctcttaaataaagaattggtgccaggttaacctggcatactgaagaaagtttcatttgaagttgcttgaaaatattctcttaaattataggaatgaataaagaggttgcagtcgcctgggcctagttttattaacctaactgggattgaaagtatccttgatagaggaggagaaatgagcttcaggaagtgagttacaaatggcctcaaagtactgagaaaggataatgattggtaaaatatgttgtaattattgcatcaaagtaaatcattttagtacataatacctcagcagaaatggatttttgatttgtttaggatatgaaagagaagtctaatattaacatgtatgcacaaaacatgtatgttcaaccagcaacagacagcaaggaataggggcatgaacattcggatagctggacgtaatacaccagggttacatctccggcatggttccattcccattccatagcctataagatatttggacatgataggccaggtgtggtggctcttgcctgtaatcccagcactttgggaggtcgaggcgggtggatcacgaggtcaggagttggagaccagcctggccaacacagtgaaaccccatctctcctaaaaattagctgggcatgatggtgcatgcccatagtcccagctactcgggaggctgaggctgcagtgagccaagatcacaccactgcactccagcctgcctgtctcagagaagaaaaaaaaaaagatagttggacatgataactacatgtctacaggctcatcagagagagagcacaggcagaggctagagctcaatgcaaatatcgagactgaaaaaggttttggaaggctctcaaggcaaggatttaccctgactcccatccccctgctgttcaaggctccttactgggagaaagaactttcttttctaagccttaggtgagtgttagggaaggatcctaagaattaaaacaaatcacaggctctctcaactcccaacctcttttgattccccacaagctaagcccttgcctgagttattgcatttaatttggataaaaccatgcaatatagatattaccttttttaaaaaaacaaaaaacagatgaagacaccaagagtcatctagattaaataaattgcccaagttcacagaactgataaatgtctggacttgattcaaagtttgtctgactccatatccaatattcttttcactcatgtttgggccatctttgcttaaacagatcaactagcacagcctagagttggtaaacccatactacaactttaatttaggaaggaaatgatactgtctgctcgtatatatttgccattatcagaacatatccagaagacatgtagaggtgagctttatcagccaacttggtgtacgacagggtgatttgcacttctttccagggtctccctggctcaaggagccacttaaaaagctcccttacttaataatgcccttgtgctctgggtctattaatttacttcccacaagctgatcaattttctgttccaagacattaatttctttaccttggcacattaaaggatcaaagctcacaacatataaatagttctttttccttctgccccaaaggtgtgtagtgaggattaatgagatgatgcttataattgcattttgagctccttggtcgaaaggcactttataaatacaagatattagttttttgctgagatccatctatcacttacaagtggccaaacattctagatggcctttgggtgtgcaacacctccctctctgactctgagttggtctgggacaatgccagaaatgtggctcaagccaagttcagagtttctggagttcccttcctttagtgtcatatactttctctgaaacttaacttagaaagtgttctttgggggaagagacatggcaataacctctaaactgccctagtacttgagggcagcagtaccactacattgattttcttttgcctctgactttaatacatagcatttattctttgactgttcattagacccacagtctgattttttagtgtcaacaaagcaataaagaaaatttgttcctcctttatttcagggctcaagacaaaattcaaaaatgcctttggcattcattttgcacagacgaatgttgttaggatattcctattagcatgtccacgtgcttgacaacatttcaggtggtattaatagtctacctgcaagaaagtgctttctgccagcctggtgcaaattggcagaacctttaagccactctttctcagcttagcagcagtatatcatcattacctgtggctggaccaagaaatcacatttgtcaatgcctgaattgctcttttactttcagtggttttagaaatccactttgttttggaaatgggcttagctgagtatgttagaagatacagaaacatataaagtgatagataagggatttaagggaatattaaggatgttacattttctatggtcagttgatctttggaagatgacttttgtgggaccaaatagaatatggtcatcttttgaatgaaggactggtaagtgggaccaaatagaatatggtcatcttttgaatgaaggactgataaggtagtgagacaagggaagcataccgtggaactaatgagcttccttctgatcactagaaaagagtcgagtcatattaataatgatagtttaaatatgctgtactccctattattctatactaagtcctatggtaaattgagaaatggggaaactgaggccaagtgacttgcccacgatcacacagctaataagtgataaagttagaactcaggaccagatttgtctccagagcccatggtcttaactcctatgctgtattgattatggctttaagagtattagtataccttctaattaaataggacccatgtttggaccaataaagtgtaagcgcagtgttgtaaaagttattttccatgttatacaagagttctatttttcagttttttcacttgaaataattgtattccttggagactgttaataaatttcgagtctcaccttaaagaggaattgatgtatattgaggcctactcaagggtcagtttgctttccgtttctttcccttttacttttatcctaagtggattcacccaaagtggaaaatgtgaggttggagtgtaaaggttggaactatgaaccagttgggcttcaatactttcacctcaaagtattctgttcttcacaatattataattccacagtgcatgtgcttgttgcacacgtctccaggagttgaaatacttgatattagagccagtggtccaaatgaaaatgaccagaagaggccaaatgtataatgttctcaatcccttatcaaaaatagatgggaataaacacacatatatttaagtacaataaaatgtgactaatatgtttttttctaaaacccagtcccatataggtgtcggatccacagaagtaatttaagaatggtttatttgaagatctctttgtataatttatagatttctcagtgtgattaagaaatgaagttattacatttttttctctaattagtaatgcacgtatgcctccttttaatgatattatgatgtttactactcatagggccattctttcttgagtatagccatcactttctgttgaagaattgatttcactctttgtttaaatgtacatacttgttgctatatgaaatatatgactgaatatcattaaagatttagcaagaatgtaggtgaatttggtgaggtttgttcagcttttagagtagccctgtataagaatacttatatttagaaggttgtttgcgcttcagtcaaactagcaaatgaggcatggggcaaataactcattctcatgcacatgtttctaaaacagttcttactaatgtttgagataaattaaaataaacaccaacaagaacatgaaaagagactaagaacaatgttaatgcggcaacttaaacaaatttggttttccaaatgaccttccatctttcacaacttttaacagcatgcaagattgctatccttagtgccagatactatcaatctggtgtggaaaacttaaaacttttttctaaatgtctttaaagctgaggtggagaagaatgactctctgtcactttcagaagggtctaaggttgaatcatgaccatgctgtccttccccatgtcacttactgtttatctaacatagttatctctttttctagcctgtatcatgcccccagattattttctatggtgctttacgtttgaaagagagtagatgatgagggtggggatgcttaggagggacaagggccctgtgtatttggaggaagtaaattaatacagcttcttaattaatttggtgtatattaaattctagaaatttggaattttagttacttctgattttgccctgcattttgctaagaatatttagctttatacttgctatcgactacaccaatctattccgtagtgagtagaatgaaggtcattaatatatttaatgtgtagccaacaatggcagatacagaaaacccaaagtaatagaatacattcaaggcagatctggcgcaagccaattaccttttctcagtatagtattctgttgtgtctaaaaccctagaggatgaatgacatcctttatgatatctgtcacctgtagggtaggattatgagttatagatgtatattcgtttcaaaaaggtacacgttctttttctatgaaaacgtctaaaaagtttactcaactttattttgaatgaatagaatgttgtaccaagatctaccaaggtagaccattataatgatctctaatcgatagctatattctttcgccatgggctattgaaacaccaagaaattaacttgcctgtctctttttcctctttgcctgccctctccatttttttctatgagaaatgattccttgaggaaaattttaaattatccactgcagttcgaaactgttaattgttcctattgcattttatttttcaatacattaatatgttataccctgtaccaaccagatacagtcccaaaacataggctagaagcagattcatagttgcctcttttatgagttcttattttaaaaattcctggtagtaaagatatgagtcagcttgttagaataatttgtctgtatgagaagtgaatggggaaccttgtgaacatcctccaatattgctacccgtttcctatcctatacccccaccctcacaacacagaaggtaggtaccagtttattcccaggtggaatctcctcagccaataatgactcctatatggagatggccctgcaattgaaatgctttagcatgcccctattcatttggtctgatgctatatgcaattctaatattctttatggcttttagaattctttgtaaattgtttccaagccacctggtttgagatttttctttcatttttaatattggtagtttggaatggagttccccaagttgcaatataggcctatgaatcaaaagtaatgaattacaattcactaatttctgccagatcaatgtgaggttggttgatgagatagaacagttcccaaggcatggcttcatcattttgttatttgaagcatattcattaagggtgtatctccacagcaccactctccaagtctgtcctaattatggaaaccattcagcagtgttaataacagttacgaaggaagagggggggcatactggcagttaaaaccactatgtttgagccttgaaactaattagatatttcatgcttggaagaagtattcctaacaggctttatgaatggatgcttgttcagaaaggtcctcttacagtaaggtaagagaaagagaaagcaggagggagagaggaaaggagggaagtggagggaggctaaatatacaaaatcagtgtctattataaaatatcggtgctcaaaagtctacaaatgttgtaccactatattataattacctctatttcctttgacatttgagtttccttatttttaaaaatgtggaacaaatctggaaagatagtgatataaaagcttatctgtactgatctacctctttgacaaagataatgagatgcaaggacatcctttatgtaataagaagtctcccttggccatcaaggcttaaattgtcctctcctcctttcccctgtcggaacataaagctgttgcaaacacttgagaggagaagaaaagaaggacatggccctatgtttctgatgggaatacggtagattaatagtgcagcttgcgtgactgtggagcgagggtcccgtctcacatgtgaaactgatctggcaggtgaattagtcatgggtcaaggagatccttgtgtctcaactggcccaattaaggtgtggttgagatgagacagagagagagtgaaggtaaatccatttccgtaaacggccagacctcttaaggattcccattccatgccacttttccaaaacatgatggagtactgcatggctaagactaacctgacctttaaacctatcgaccaagggcagagtgacttcaactccacctctactaaagataaattgatatctatctctaaaaacttcataaaacaaaccaaaaaacctaggatgttttttaatgacttattgacttttcagattgttctttaagctgttttttaaactttaaaggcaacactgataatgaacgcttccaaatggtaaaacagaaaatccccttcaaatataatcggcctgtagaggagtggctgcaggaaaaaggtaaccgtcattaaaactttcattttaaaatcatttgatcctaaaccctcatttttaaagcctgcaaataaatgttccttaaatgataatcgcctgctgcataaatgactgttttaattttcattataatttgtgtcagcttccacctgccatatgttgataaatcatgctataatacattgccattaaaatacagttaaagggactaacttctagcctgctatcagcatgacaaacacaaacaagaaattccaggaacttctaaaacagaaatgtattatggcaatttaaccactgcatgacattatttattaatttgttttaaattaccttttacaccaaagctttctaaagaaattccaaaagggctttttaaacttacacctggaggctgttttggcttgtagcatgcttaacaaaacaaaaaacaaacaaaaaaacaaacaaacaaaaaaccatagattgactcttgtaacttaaactacttaaatattgtaaggggagcatttttttttaacatttgttcttaaagaaaaaaatgaaaaagatgaattttgcctttaaaacctacagaggcaaaattattttctaagagattaaggttgtgtcctagttgctgactgaaactaaaaacaaaaacaaacttattttacacttcggttgtgtgcatacacttgtgtatttgatgttttatgcaacaaaagtgtaagaagttaacataatgagttggaaaagaaaaggttcatgaaaggcaaaacagcagtctctgatttgctggagacaacaaccactgttaataaaagagggcagcggttataactgatgttagaattttcctgtatagcttctagctgttagaaaataaaccattgtttttcaatgaaaaacagtctctaagaagatacgtattctttgttgttgttgttgttgagccagtgtaagctactcttgtctcaacacctaaagggagctcttaacatttgtagagatttcattgagttatatagaagaagtaaccaggtatattacttagtatacaacttaaagagcaaaggactactacagttttaagttggaggaagacattcagacctttaaacgtggaaaatcctcacggagtgttaactgtttgccctgtttttaatgtatgtggtctaattaaaaataagaataactctaaaaagcaaataattttgtttagtaatcatcagctcataaagtccctttaacattaaagacaatgattgcctcactttaaacaggaaaagcaaactagatgcatgtctgagtctcatgtgcctgagaaacctttttgtttctttcaattttatgttaataatttttattttactccattgccttttaagtctaagtttaatagcatgccaggcattttcatttgtataaaccattataaagttattagtaggcttttagtttttcttacaatagaattgttacccgttggctttcacataaaaggtgctttcaaatatacaagttgaggggttgggatggggggaggggtggctgaggtgggactggggaagatatcctagtttcttaaatatatgtatgattatatatgcatataaatctgaaaagaattatttgcaaaccgtgagtttctcttctacattttgttctctgaaaaaaaatttttgttgtaatttgggtgagtaacatctatgcattctattgtcttacctcttcctctgcctagctaaccttcccttcaaaaggaataaaatataccaaagacttgtaaagacaatgaatataaaggataaagatagatggatgattagacagatgcatttggaagtatttggaatgcctctttggagttatttctgtcactggggtggagagctgggtcatagcattcccaagtctcttttctggctctgtctactattgactaactttctgaccttagacaatccacttaacctctctatatctcagatttcccatctgaggacgggcaaaataatactgcctattccccaagggtgttctgaggtttaattaattagtctttgtgcaacactgactggagacatgcaaagatttaatttaagcagtatgtgaacttgatgtccaaatgaggtaataattaatgacttccaagaggatgggtatctaaaacaaaaagtaacctgctacaattcctctaccagtgtttgttataaccaaattttgcattaagaaagataaaatagttctcagattaggatatatatgcataaatatgcacatatatatatatgtttttatgtacatataatggtcagttattataaaaatctgatcataagccatgagtgaaaataatgagaataatgagatctggcattgatttggggaaatcttgggcaaatgataaaaagaaactggtcagttcttcacattcttcatagggaatgaatagtgatggttttttctgttattcactaacccctgtttatctgagagataaattaatcagagtaagggatggcaggacacgaagagtgctctactgttcctttactgattgctagctttgccattaaccacctaatccaaggtacagggagctaggagagggttttactacagcagaagagcagatctagccagaaacagaccatgaaacaaacaagcaaacagaaaagcaaacactccctatggcaagatgaaaaactgaaacatagacaaccccctttactgtctcactccatcagtgtcttattctcaagaattgattagtcagatctctctgggaaagtagctgtagtcaggagtagaggggtagtttaaatcttgtagcccaggaaacctgccttgcctttcctgatgcttgggtcagtcttgaacaggcaaagagcactttgtggagtgaatgatggcaactggaatgaaggagactcatcatctctagccagtgtaattcagctttgcattttcagttttctctgatcctctttttatttgtaagcactggcataataacaccactggagagataagatgagaactattatagaggttatcattgtgaagtattttcaaggatattagaatgtaagattttctacctgtaatcaagtataactgttaacttatcaccagtgctgaactatacacaaaataaagagatggataaatattatgattcgccagcagttgtgtgcatggaaagtatctcttggcattaggctgtctaatgtaagatactgaattttttcctagaaatctcctgctaggcagctgcttctaatttctaattcattatgttaagctgcttcaaatgcctctgtggggttgagggagaatttattttccccttccatcatttcatgtcttttgtagtaagctcagggcttccagaaaaaaaaaaaaaaaaaactgtcatcaacaataaacagtaaagaggtatgaactccagcatattacttagtattattatgcattgaactttctgctgtgtcttgtgtgaagaggacagaggacaaaatacagacagtgatgcatatgcacaacacactaaatgaattgctgagaaaatgatgaaaatctatgagatctgttttgattgcatccttgggatctgggtaattctgtagtcattaaggccagcagatcccatattcaggttctggagatttttataaagtatagatcattttcactataacaaagttctctggccaattcaccatactgcagtgttgaaagcttccaaagggctattatttgtaaatcattcttgattaatgggcactatgagttgcctagtgtgcagaattaactcttgtctaaggagtatcctctgatcggatgagcattctcttctctgccacttccatttctttcattgttatacattgagaaggtatttcacattatacaccaggaattcaaggacagatcaacattgtgtagccttgaagaccatgtaatagtggtagatttttaaagcccaaacgtgacaatatccctctattcatattggaaattataaagcaaaaagctttataattttgttaaaaaccctctttttattaagtagtcataaataacaaaattgtttctagttatttctagctaaggtaattcaggtgattagattaagaatgagtggagcgttgtttgatcactaagtagagaaaacttcagaaggcgtatatttaattccattaataagtctttcttttttcctttcttcatatggaaaagcaaaatgaagtaatctggagacataacagtaaagaaggccttagcatattgctgttctgataaattgcaataaattttaaaaagctcttactttgagtttgcttgggaaaaaaatctcatacttgagagttttataagtagaaagagttgggaggaattttagttgggtttcattcttctaaactctatactggtatgttttttcattttgatacttttcagagcagtataaatggtgtcaaagtgggaactcgaaataaagtgaactattgatattcttcaactcattaacacacctctatgtcattttaaggagttttatatgttgctttcttcattaatatccatccattttaaaaaatttattaaatctgaaggacaacttccccaggactggagcattaccaatatgcttatatttcatactgagggaataatttagttgtgggaccataatccatcctcctaaaaacaaattaatagagataggaatttatctctcatgattttgttaaccagaaaatagaatattatgcccaatgaagatttataggaaatgatacgtttggtgactagaaatgatacgtttggtgactagtagttcatttttacaagtatgcaatgaatccaagtctcttaactgaaatttaatttcagctaatttaattatcagacctggtttttaaatttagttttctgagtcacctcactgagtttttttggccatatttaattcttttcattctcattattttacttcgtagctttaaacattaatgcagtaggtatccgtaatttattctggtcatcacctgatttgagtgtttctttctgtcatcctcaattatatacccaagaagaccataatacttcttatcattgaaccaagatttcttcttcctcactatgaaggaatagagacttgattgttcaagttatcaaagattttcagctagacagtggaagagataaccataatgaaatgttacttgctaacgtcagtactgaggttttgttgtctattttttcctccccttcaattgctcaaggaagcctgttatgatgcctggtccattcagaccaggtaaggcaaacaaggaaaacgtatgagaataataatgtttcctccacccaacccactaggccggcagttaaccatcttcaacactcaggcgcaaatagccattggtggaaaggacaaaggacgcctcttccaaggccaactctctgggctctattatgatggtttgaaagtactgaacatggcggctgagaacaaccccaatattaaaatcaatggaagtgttcggctggttggagaagtcccatcaattttgggaacaacacagacgacctccatgccaccagaaatgtctactactgtcatggaaaccactactacaatggcgactaccacaacccgtaagaatcgctctacagccagcattcaggtaggcctttttccaagtattaattgcgtctgtatttttatctttgcaacattgttatcatggtcattgctttatgtagctaaagagtttgaattactatgtaagaaggatgctggcagatactcatagtaatgagacccaggagaagagaaaggtgaagtcattgctaaagaagtcataaaagtctgtggcactcctgggttgttattcttattgtatttatcactgaaatggtaaagctgttattcaaaacgagcaatggactacactttcagtatgaaatactctctcctttaattttattaccttttcaaataacagaaagggcaagggagggaaggaaaatctgttatcatatgaaaagctatatcctagttcaatttcattcacattctccagatggctttgctataacatgaatctttcattattgaggtcaatgggtaccattaaatcaagggcagttaaagttagaagtgcaactactccttgtaaaatgcagtctttatgtttgttatcaaatcctgattaatcatgtgtcaggtttgtgcccattttgttttctttatatttgatcaagatactaattacagtagaaaatttgaaggtttgagtttggctataccggaagtccttgtttttgtggcagtttttttccacttgaaagtaattatatccaaactaagcttaatactttgctgactcccttggcatttcataaatctagttagtagggggtaggaggttaactgaattattagccttaaatgctctggcataccatgagacattccaattgctgctgcgacaacaattacttacccctatcctagttagtgtttatagaaaaatcagtagattagcacttgtcctgtttgcttctttgttttaagacattatccaggagctcagttgtgtctttaacatcacctttacactgactccaatggacgtggttaacttaaagtcaataatcaattataccacctatgtgttcccatttttcagaattaaatgtatgtgagctaggtaatggtaagtgtattatctgttgccttcctttttccttttccttgagcagaagtatccagacagctctttgcatggctccacagtaacaatttggagttatatatgctgacagtgtcataagggcaattttatcgttttcaaaaggcttctaaaaacctggttagcatagtactgttaccgtcacacatgctattacctgcatacctacacacatgctcacgagaaaaaaaatagctcttctctactgatattaaaccaataactcctgacaccttgctctactcactgaaaagaagataaaaggcaatatatatttctattatgactctctctagctcaagagcagatctgtttattgttggtgaaaggatagttctgtctgcacaggtcttggcagacttgttttgtttctgtcagaatgtattctgctaactctgtgggaagcagagaagcaaatggctttttcttcataggaatggctggtcctgtagttctttttaaggccaaattttcactgaccttgagatgatttaatgttacacggggattcgggaaccaagctgtagtaattattggttttttggctttccctcctgtagcacatacataaatgggaataaactgggtgagttcctgaactctttccgcaaattaagaaagtcagaactttggaagaaaagtagggtacaagatacaaaatcttgctagtgattataactctaaacgttatagaacctatggccattttagaggagatgaacaactgggaatgccttctccaatagcctctctctggcatgtgtttctttaagtccagtaattatcgaactacatctacatgcttttccttttacttccaccaagtctacaaaaatgagttataaacctgttgagactctttggttttaagggtaagtacatcctcttggaggaaagccaatagcctacaagaattgattagactgcgatgagggattttaaaagccctggattttttggaagactaactagaggaaataactttctgccaagggttttggaaatcttttttgttcttgaccactagtcatcagaactctgccctgtgctccattaaaaacttaaaagcctcatcttcaagcctagtctggtcttaaacacattctgttgatcacatcaaacctatgttaggactggggacccaacaactattggattctattcaaagtttaggacaattcccagactctagagactgcaggtaaggaaggtcagtcccagaagcattaatatgcctatgtgaccccactacttttcttagatgaggaggattcataaagttctgatctctgggagatacttcagaagtgagtggggaaaaaaaggtagggaagactggatttcatattcaccgggcccattattcacttttttatctatatgtgaaatcatacatagaacattttccaaatgataccactgttctgtcctcttttgctaaatttaataacattgtcaaagcaaagttttcctaaaatgagactcctctaggagaaagaaaataagcatgtcagtccaccagtataaaaacctgtctgttcaaaaatcctctagttctttcttaaagcataagcaaagaaaacatcctttcaagagttctttcctggtcaacctgaggtagtgttgatttcagatcaaaggaaaactgtaaggtgctttcagtgctgcttttaaccgtgtgtgaatgtgaacaagtagtttttgagttggtatgtctgtctagtgttatagcctcttagaagtaattggtgctttgatctttctgattccattttgttacaggtaagagtgtagaactatctgtgaataacctggctgatgttaatttactcatagcaatcatgcccaagcatcaggtcttgatcctacattgagaaggatagctctaggtactctattgaattttaaaaaatttaagatgtgcattgagaaagcaggtgtgtgagtgataattctcaagtaaaggcctggcacttcataggtgctcagtaaatatttactgaatacatctgaaaacaagacaggctttattacctactttagagtcatttcacaatggaaggtagcatagcttgaggaaagtgtttcctccacagtgatcagggtgctttggccaaatttgttgtatttttcagtagtaaggctatagcatagtgattcagtgcatgcacttggagctagattagctgggtttaaaactttgttcatcctcatattagcttacatgaccccagacaagtcatgtaagttctagttaactatttatatgaaacaaattttcccataacttggtggtttaaaacaattatgtcattagatttcaaaattctgtgagacagaaatttgggcacagttcagcaaggcaattcttctgtgccatctagagagatgattgtgttcactcagtggctgactttgcctggagggtctggctttatttacataccttgtgctttgctgggttaactgggaagatgggactcagcagggcccttttccctctctatgtattctctgggattctccttgtggtttctccagcaaagcagatgggctgtgtttatagaggctcagggcttccagagagagtacttccaggggcaggaagtagagggtgccagttttatatagcctgggctgggtaactggcagtgtcacttgtacaatatgctattagtctaaacagtcacagagctttcccagtttcagaggaggagacataaatatcacttctcaataggaggaggagtagcaataatttgcaaccaacctaagtctaccacattactaaggctaccatattataaagtagggagggtggtgtacttctagtggctatgttatatgattgtcataaggataactgagttgatataagtaaaatgcttaaaataagtgtaccattcaaagtaagactgcatgcgttttaaccattattattatattctgtttcccacaattggtgtattaaatcaagatcctctcaggcaaatatctgcctcagaaaatggggctgtgactaccgacagtagtggctatagtttagagtaagggctaggaagtttgggggaaatagagatttgaaggtggatccaagcagaatttaggggctgaaattagtcctggcaaatcaaaatttctatgatctcaggaacagacttctctgacacctcactacccatctttaaagttctgttttattttaaaccaacttagagttctatgagtctttgaaaatatgttctgtctatccacatgtcttttagggttgcaaagaagacaaatccagattccttaccatcgtggaatttacaatctaaatagggcaagagggtttgacatgagctatccatatgaagtagtgactcatgaatggctctttgtgctggggatggcaagtgttgcatggtgtggcttgactggatctcatgcactcattctactaggccttgttgtaaaaagagcacaattggacaggtggtgagaggaacatattcctggttggtcaaatgtcagccagaagctaagttgttaaaagcagagattataatctctgggagagatagccaagtccaagtagaacagagaatgcataagagggagtttgtgagtagcaaggggtccagaatcaaaatcttggcctgaaactttgccaagtgggagagggcccagaggggtaaactgaattgggttccctgtgtaccttactaccaggaatgccccaataattgcacaaacacttcctctacaactgactccaatattggtgggtaattattatggtgctgataggtcagcttctaaaatagaaaagttcaactcagtctacactcaaattcgttggtcttccttcaggatagaaggaaaaagtgagaaacaagtcttttaccttatgtctccatcctgagttatcagcagaaaaaaaaaaaagctcagtgtgttctgtgcaaatcaccatttggaatcatttataaactatttgcaggatactgatcatgacatactttttctgtgttgggcattggtaaagtcaccttgacattggcaactgctgcctgaaaattgccagaaaatcacaatgctcagcatggattggaactatccttataactagtcaaaatgaaagacttaagaggtttgtgagatttcattctcaagcttcacaaacttggtggttgaatgtgaaccacttttgcaaattccagaaggaagccacaatttctcatgttttgtaaaaattcttataggcaaagtactcttagcttttcagtgtcagactggagacagtaagaagcatgcttcagccttgatactgatgattacaaaacaaagaaaaaactttggattaaaatgttcatcctgcgcaacgtctgttctgggtagagtctcagtgtgttgaagagcgtgggcttttgcgtcagagtttctgagttggactccaggtttttccagttgcttagctgtatgtataagtctgttctcacactgctataaaaaactacccgagactaagtaatttataaagaaaagaggtttaattgactcacagttccgtatgcctggagaggcctcaggaaacttacaatcatgatggccggagagagaaaggagagtggggaaactgcccccctgatcccccctcccaccaggtccctccctctacatgtgcggattataatttgagatgagatttgcctagggacacagagccaaaccatattgctgtatatctctgggcaggtgattagcctctctaagcctcagttttactgtctgtaaaagtggccttacagtacctttcccgtaggctccttgtaaatagtaaagtgcaatcatgtgtgaaaagcaccccataacttttcagtaaaaattttcacataaggaaaccacttcaacctaagggactctcccagaactcacagatctccctagagcttagccttcctgtggggctggataagcccaggaacaattttgtttatactcatacaaactcacaagggcctggattgtgagttcttctaagggccccagattgaatcagagccccaagctcatcaatcaggagagattgctacggcaggctctttcatattctggagtgggaattggctttgctgaacagttacaacacatagactattctattaggttgaagtgtatgaaaccactatttttgtagatcaaaatggttaaatattagcaatatcacatggttctacgatgacacacagatttacagcatgttgttatcaatggcacttcgaggcccagactagaacctcagatattctccaggtcttcaaataatcaaactgccttgcactgggagacaagatagatccaccttatccccaaatactgtgctatagcaggatgtagatcacactgtatcaaaactggttatatttacccaaagaattatcccctctgggtccttccaccttttccctgctgccaccagcttgagagaaatgagataaggaatctacacagttttcatctccttgcttttaccactagacaacagagcctccgggggaagtttatttttaggatcagggctcaactaatattgattaacagccttacataatgtgaggctccagggtttgttcttttcctgccaagcctcataactggagaaggcgctgaagatttgtcagtctaatcagactttagctgccagccaagaaatatcttctgtcttctccttacccttacgcaggtactttctttttccctcttagagaataatttggggggagagaaattgcactctaatttacttgttgcctggtaagattctctggtgacatttactctctggaactgcacagttctaacaacaacagaaaagggagcttgatgggtttaccttcctcttaaagacttagatgttggcagtacaaataggcaagtgaaaagagtgcagtgtagtttgttttcatccttcctttaatacgtaattttggtggatggaacaggtgctttccaaaactaggtctagtcgatgaaagggtcctgagggcagacgaagtgtgaaagctcccaggagaattcatagagatgcccttccaattaggatgtaatatttacaggatggaatttccaccagaactactaataaagtgctggctcttatttctaggcatctgaacagctgggagggaagtggggtcagttcttggctacccacgggtggaggtccctgagtgtttttaaacctcagggtggtttttctaattacctaacagactctttagccgaatctaaagccaaaatccttgctgcgtggcatatggttctcctccttcctattgctctgaccatattttccaccacgttgctccaatcacacaggtcttcttgatccttcttgaacacagagcaagaagaagggtgaaaccggtgaggcaggattatgcaattgcaagcttagattttcatcttaaaattgatatttgactttttgcttttgcagatttttttcctgcattaatattgattttaaaatatttcagcaaatgaaaacaaagttttagcaaacccccgttaaatcttacaccttaagcgagtgtctcattcaatcttctcagccctgcctgaatgtgccaagcgtgcctgtgccttttcacctgccatttcctctgcctgcagcagcccttccctgctattcacagtactcactccctcacttcacccaggtttccgcttatattgcaccttccagaaaggaccttcttgaccgtctgtaaaatacaacactctatcgccttttcctgttttgttacctctcatagcacttatcactgcctgacattatagctcacatttatttgtttattgtccctatttagtagattgtgagttctaggatggcaagatctttattttaggcactaaaatagcacagtgcctagaacagtagcgagcacagagtaatacgcagtcaatgttggttgaaaggtataaatagtcaaccatccaccagtaccttctcagggagtccacaggccacacaatatttacaggctgaatccaagcccctgtttcccaggacccactccctcatgaggctcaccagtgagggtgggcaccactgggtttgctgctcttggatctttgctctaggaataaggagtcccagagatatctccttgtctctggtatgtaagattatttttgttagcttccagtcttgttgctcagccaaaagcaagggctaattctagcacgtatagttttcaaatcacttttggaaatgtaatatcacccacctttccctttccagtttcttcttcttcctttccaaataacttaatccttaattctcctaaaacccactttcaaatatatgcaaataaaaattacttggtaaggatggaaaattaacttgaggcttttttacttttttttttttttttttttggtctgttgagaaaagggcttgtagggtggtgcctgcataaactggccataaaaatatgggacaataagttgttgaaagccacaagaggcctctgaggaggaaagcctcctaaatgccatcatgttcccaggctcagagcgagatctgctctcttatctgtaaacactgtgttcaaaggagaaagactctgctttgaagcattgaaatgtggccagatatgctggctcctagtgaggcccactccccccagctgctctccgataaattaaagaataaatcagtagttaattttatgctgcttcagcacaaagaaaatttacctaaactgccattgctatagattaggtgtatgacacaccgcccccctttcaccgtttcacccctgaacatctgcttcttagagctaagtgattgtactcaacaaatagtgtggagaccagagcttggcgcctttgcagcctccattttacacttggccccctggcactccactctttatgcactcttaacctgtctattctcattcgtttgtcgccaccggacttcgggtaccctacgggtggtgctgaggctggtccccaacattggtctaatggctgagtatattgtgtgagcaccatttattcatgtctgaaaccctataatttgactagccccatatttacccatttttagtgataatttgaaaaaacattgatgattgagagaaggaacaatagctatgttgctcatcattggacatttagagcctagaatggtgcctgccacaaagcagggctcaaaaatatcagttgaagaaaaataaatgtgttaaacgaatgaaagtaagttaagcaaatgcttatcatcagagtgaagaggcagtgggggccaatataatttatttacaaagtaggcaaagggagttaggaggaagcagcctggtacggaggaaagtgcattgaagcaggcatcaggagacttagctcatgactggagaagttcttaaaaccatgactctaggcagaccttcatttctagctgtagaattttggccagggtcctttgtggagctatgtttttttattatctgaaatatggggatgatttccaacttcaagggtaggttaagataatataagtcaagggcttaaatgggtgcggctcaaagattattattgctgctgtcttaaatgggattataatctggtctcagctgataaaccagtattgcaactatattttcttttttattctgttgctagtttgtggtctctgatatggcaattagcttccttgggcctatgctctttcctcagaaaagaaagttttattttaacattatctagcatagtgtcttgggcacacacacacagggacagttaaatgtaggaaacaatgaattagaagaagtaaaagaaaggagaagaagtaaaagaaaggaaaaattgagaaggagagaaagacagcagcgatgctctgtaattattgctataagaattacgtgcccatttcatggatttgtatggcttaggttgagagagatgaataaaatatctttgatataattaaaatcataatataaataatattttttctatatctcccctctttgctgaaagctgttgggtgagacatcacaatgaccacttctatgtaaaaggtagattatagatggccctctgcatatgtgggattgcatctgcattcaaccaactaactgtgaatcaaaaatatttttaaaaaattgtgtctgtactgaacatgtacagacttttttcttactattattccctaaacaatacagtataacaactatttacctagcacttacattgtactagacattgtaagtaacctagagatgatttaaaatgcacaggaagatgtgtataggttacatgcaaatactatgccattttatattgaggacttgaggattttgccatccatgggaggtcctggaaccaatcaatcccccacagatgctgaggaatgactgtacttgataaatgtctcttgaatcatccaaaaaaaagaaaaagccaatggtttcaatttaaactgaggtaagaattgttttttttttttctgaaaatatatgatgttctatttatatataataggaaaacgacttcaagcagcaatcgtcacttgccaggcatcaaggcggatatttccattatgtctatgacaaggtggtgggaggggtgggatgtggtttcatacctttctggtgcatgtttgaatgattgtaaaaattagaaacacactgaggctgttatgacagccttgccttttgaaaccttctaattaatgccttgggttgtctagagagcttgttctgttagctaaatggtgatttgtaaggttctccttgatttcctcatcattcatggatgaaataattggggaaataaaatgattggggaaataaatgcacaccacgtctgtggtggctagcagtcactgagagaattacttgatgggaatttgattgacttgtgtgtataatgcaacctcttatatctctggccccatcttattatgtgtgtgtgtgtgtgagagagagagagagagacagggagagagggaggatgctcgtgtttgcttgcactatggagaacagtgcttcttaaactttaatgtgtgtatacagatcacctgggtaatcttattaagcacagattttaatgcacgtccggggtggtatctcagatcgtgcacttctaacaagctcccagatgatctcatgctgcagatatgtgtacctcactatagagtatagagcaaggctctaggaaatatttacggttccttgctgagtaatcatggtatctgtttacctatctcttccaaatggtcttcccaaacttagctcagttctcttcaagacaggaaattttgttaacccaaagtattaatgtaagtgaaagggtggataccccaactaaggattagaagagaaaactgtatcccatcagacaatgctgctccgggtttcagatgccccttcttcctgtcccttactttactgcatacccccaaggcagatggaaaaaaacataggtaaaatttaacttgtcataatatttatccccctttctgagaggtgacctccaatggaagcagaaggatgtgaatgattttaatccacggtaacaatggggagccagtcctgaccatcttaagcagtataaatgtataaaatgacagatttttctgctctgcctctccactttctcctcccggatactgagagagacacatattcatgcacccacaactcacactataatgcacaatgaaatttcacccagcctttatctcggggctgctgttctcatgattaatgccctactggctgggaagctattccactgaagacagacaaggagagaggaagatgcatgaaatatatctctgaggccatttctcattattattattatcattattagttccttactaccctatctatctatcctgttagaggatgcttgatctattggcaagggggaggggatgacatttgaaagcaggttttatgagggagaaatgaacaaggacaaagagagaaatagacagtttttatgaaagagaattaacctggatggggtttttgttatgattgttgtcctttatttgggggtttgtttgttttattgttgctgttgttttccatttaaagtcaaaaataatagatgcctccatctgcggcttctgatttttttccctagggatttatttttgcatgtgttcttttgtctttattgagtctctgtctgctagaatcaatatgatataacttatgcaaattatatccctgaccacttatgcaaaaaacagaataatttcgttgctctgtaacactcttaatataattacctccatatcctggttgatttcaagcttttgaaagggctactttaaaaaaaaataataaaaatctatttatgtgttgtataaaccacagtgtctgattctctcctgtttctcattcaaagaaagggtgactgctaaatgatttctggctctgtcatttaagaagactgcacagcagtggtcttagttgggaagttgggaccacaataagagtgctattgtaacacgtgtctactgataaaatggcaaattcattagcctagacaaggagtactatgatctggtttcaaaaatgctgtatacttccacagtccagtttatgagggcatgagatatataactgaggtgcccccatgttacttcaattttagtttgactttgaatttcattaaaaaatatttgagttatttgagtgcctagtatgggctaagtactgtcctgggcacttgaacaacatcagtaaacagacaaaaaccctcttttcttatggagaacattttctattccacaaacattgggtgtctcataagtgcaagactttggagaaataaagaatgaaatagaaatttttctgctttagaggaacacacagtctggtactgttcttaaatattttcagactacaagcggactcacttgcagcccagttttttacaaaaactttagcatgctgattggctagtacagttgcaaaggcagcagccatctatatttacagaggtctattccaagaatagggtctttaatttctattcaaaaaagaccaaatttcaaatgtaaacaatatatgttttgactaaaaaagacagaaaccgtaaagcaagttacaataaagtgattgaaacatatttcggtcctggagactaaatttgcaatgtttatggcaaatatcttcttgtgttggtttgagattatagttttatggaatgtttatattggaagaatctcagagattgagccccacacaaccagatgagcttcagagatgggccattctggtttcaagtactagtttcattgctcaaagctctacgtccaggggcaaattgctcaaccactttataaaaaatgtaaacaacaggtaatttcacattttaatttatttttatctaaacaatatattcacatagtttatttttagtgtatatatgtatatatatttatttcttatttatttcttatttatatatttatttatagagatgaggtcttactttatttcccaggttggtctcaaactcctgggctcaagtgatcctcctgcgttggagtgctgggattagaggtgtgagccactgtggttggcctaagtaatacagccacacaatttaaaaccttgaactgtgcctagatatcccctttggggaaaaggcatcaccttagttgctagagtgctggctgatggctgttggctaaatccttcacgaagaactgcctttgactattgaagccaccttgcccaaccaaggtcaagccccttcctgaagggtggcccatatccaattaatgatggtgaagggtggcccatatccaattaatgatggatgatggagctggggggatctatcaagactcagcccattgtctcaagactggataactgggaagggccttttagctagagagtttcctaaggccagctgaggtctctattgcatgaatgttcacctcccccttctgcccagactctgatgtcactctccccaaacttcccaaacacgataccgggcctcagactttgttttctgaaaacgcagctgaagatagatagatagcatcgtgagacttaaaataagaaaacaacaataacaaaagaaaaacagtagtatctttctaaccttgccctaaagtcctgctctatactggtaacccttttatatccttttcagacatttcccttcatagttctagcaatatgcttgcatttctatttcttgactttttcagtttgacatattaactaatgacttctgcttctggaagtaaaagttgagctttctcatgctctccctgccctacaacccacacacacttttttaccttccagtttcccagtaaaattctatcgcatttcgattaaataaatgttcagagtttgttattatgactttgtaatatcgcctattgaaaacaatgtaagatcatacatgaactgacttgttccacaactattcaccagctgcatagaatgtgccagacactgttctagagactgaggatacagcagtgaaaaacaacagactatatttctacctctgacaaaacattatactgttatgacaatttctgttttcctgtaactctttgtttgttaatgaataccctcgttatctcgttagcttatttttctagccacccatcagtgccacagccaacagctacaaaagacctcacaagataaaccgacaggactccattatttctttttctgtcttggaggtctcccttctggagtcgtctgacctcctgctttagtctgggctgggcgctcgctgagcctgcctcacagctatcatcctgcgtcttccttgctcgtcatgctggaaaatccctgggccctgctcctgtattaaatcctagtttcagctctatttatttcctcattttcaaggtgcacattgtcctgtagcctcctgagaaaggatagctaaaaagtaaaatcattgagacattgctcatctgaagaatgttttattccattctcacccttgacgataatttgcctgggaaggacttgtatcttggaaattatcttcactaataaatttaaaagcatccgtccaatgtttttgggcatccaatgttgcagctgttgacatcacagtttggtgtctaattccttgactgcactgatttttacttttttttttttttttttttttttttaccctctctctgaaatatccttatcagtggacctcaaagtagcacttacaactcaggtctcttgaaccacatgctgctgccccctatagttcttgcttttgtaaagttgtggttatttgccgattagctgccctgtgttggcatcctgactttggtatgatttgatgagctaagctattactaaactataacacacacacatacacacaaaaaatgaatagctataattaattagcataaagttttgagggtaaccaactttagtagagatctgagatatatataatgtatatatatatatatatatttgaacattttgccttgggttagagagggaattggtggtacagtaattcttactggaattgtgtagtgatagctagtttatatatacatatatatatacatacatatacatatacatatgtatgtatatataaactagctatcactacacaattccactaagaattactgtaccaccaattccctctctaacccaaggcaaaatgttcaactcttttttgtattcccttaagagcccttattttttttttcagtttcaccaatcatgttcatttcttagccacctcagaaagaatgagaattaaataatatgtataaaccctttgaattttttacatccagaaatgagcataagctcattcctctgcttcacaccagatgcttatatttttgagaggagcaaggattagaattgtcactctggaatttttatgctacaaaatgtcaatcaatatgtttgcatgtcactgggttccatcctacagtgtttggtgataaagtcttttcatttggctcccagctttatcaccataatatatttatttactttaccttacatgtgctagttggtagaagctgtagaaaaagaattactcccacatatttctttcccctaaagagaaacaatatattgtaagaacacagatggggctccacacaaaaagaatgccgaattaatgttggatggatgtacatatacaagaacttgctatcagtacacaattccaataggaattatatatacacacactgaaaatagaatttgattaaataattacactaggtacaagctacattttacttccattgaaggagagctaagtggaaactagtgtgagacaatcatgaatagaaaagtgcagaaggaatttgatgaggatgttcccagggctatttctagccagaaaacgaagctggaggctttgaagtaaatcaaaatatttgaagaagtaagaggataaatagcaaaactcacttccaacatcatactaaaagcaccatgcaaccatatagaaaacatgcataatttattttgactcaaataactatagggagattcttgttttttttaattaggagatttgaggtaactgtctagactacctatttttatgttgcattcagcaatatgtctgctaataattagagggaaataaattacataaaacaatgccagtcatgtcattgataaaaaggaaattaaagtgtgattgtgtttctctttctctctctccctcattttcagtgagctacatcctcttgttgtcctcctcacctgattaggcatttttgtaagggagtttgcctccgtcctctgttgtaaacattttccttacctcagcatcctttttaaattcaaaagacactttcctttgcaatgcactatgaaaggcgattgtgttagagaatatcagagatggctttgtcatgtctggtgctcttaaatccttttcttttttttcttttcttttcttgagacggtgtctcactccgtcacccaggctggagggcagtggcgtgatcggggctcactgcaacctctgcctcccaggttcacgccattctcctgcctcagcctcctgagtagctgggactacaggtgcccaccaccgcacctggccaattttttgtatttttagtagagatggggtttcaccgtgttagccaggatggtctcgatctcctgacctcgtgatccacccacctcagcctcccaaagagctgggattacaggcgtgagccactgtgcccagcctcttaaatcctgttgtgtcctaaagagtccactaaacgaggttgagggtatgatttgacaattgaacaaggcctcagccagctctcctagactgccccaaaactccctgagcagagagacccaggtggtgatggaagtatttttcctctaaaagactgtggagattctggcaaacctatattttgggtttagctttcaaggaagaggtggcatttgaaaagccaggggcctttgtagccattttattcactacctaatgtgaaggtggtggcagggaatggaaaagggaagattatttagtcgataaacacttaatggccactgcctgctgtgtggacagatctggatagagttaaaaagataataaagcaagtgtaggatgcctgtcttcatggtacttatatcatgggaagaaggcatgaacaaaccaattttacacataattattcaatcacaatcatgacacagtgtgataaaggaggacaggcttctaagacagcagaaaaggacctgaggtagtgttgtcatctggggaagctttcttgtagaagcagtatagaagctgtcctgtgcaggatgagatattagattgcaaaagaggacaagggccagtgttcccgccaaaggaaatagcctatgctgaggccctgctgtagggatcatactgtatcgcgttcctctggctttggactacgcattgatgctaaagtctggaagcataccatattcgaccaagtaaagtgaccagttaaggtccccacttaatgggctaaagataggtcattccaagagtgagcctcccattattatgactcatgacaaaggggtgtgggactggttggaaaagagtttccaaagctggactgcatcacatggtcatgtggaatgggctgcctgctctcccagtctgaaccctacctctgtgctatgccaaaggtgcagatccccttagtgaaaattggagacatgaatcatttaaggcaatgcctcacagacccatgtgcaaggttccatggaatgtgttaatatatcacactcatctcaattttgcacggtacatgaaactatgcttgctgatgagggaccatacacattgaacagatcatataatggttatggatgtaatgtcaataatgtcatggaacctatcatatgttgtaatatcaagaaaccttttagcatgtacatttgtctaggtttctggactttacagccttctggtatttcacttgcttgtgtctttcattgaacactaataaccagaaatcagcaacgtgaaaatttgattcttcttcctatttttctcatgccttactttggtctttctttctgcttggtggaaactgcggagttcagtggaagttttcctgcagtctaattagcccctctgtttaattttgtaataaaaacgctgaaccagaagctggagataatgtgcccaattcaattcacagatgtcaatttctttttaattgtaatccttttcttgagttcttcccactcttacttccctggcacagctgaggcttgggtgattacaaaactttcatgcctacgctggagattatgcctcctgctttaggattaaattcattcgttatcattgttgtaattattagtagtaacaatgggcatttccacccaaacctgatgaatagtagttttcacagtctttgcctccaaacttagcttatttcagttctttgcccagataagttcttcactctttaatggcagggagcattccgttttctgttgcatttaaatgctattttgagatcattcagaagacaaggctctttttcctttttagcaggttctcctgggtgtggagagatggcttctttccccagagtaggagtcaccacttagtgaatgctaatggggtcttttcttcgtgatgcgactgctgctttgaagatgcatttgaactggcaaggggcacctcttagctgcaatctcttccttagaagggtgccagctccaggccctaaaaagcacacatagctttgacttccatgctgactccaaaagaaccttttctctgcctttttgatggagtagtccctaccactaacagaacagcagtgtggcccaaccaacttgaaaatggaactggctcctcagcaacatgctaattctttcaaacttccttgtcagactcaaacctcgatgtgtcttttgttcttaaactgcatttgtagtaagatcttcaggaaaagcaatcagtgagagactgggtcaggcttttatttaattactttgcactttttttccccctctgaaccttctccaaatcaaaagaaagcaatgcagtttaattctgaatatatgaaatgtttgcactttaaattataaatgtctctcaacgataacaccttctgaaaataatgctccgtgggctctttagaagaatatttaggacagttcatctcaggtttaaggtgcccaagctactatagtgccctttcttatcttggttttatgtttttccactatggcttactgatataatttcctaatccttcttatctcaaatgtctcttagaccgttaaacctttgcctataaaatgaaggggtttgactttgaatctaaaggagtggaccatccctcaagcaccctagtctctcagcgcattcattccacaaacatttttttgggagagcagggtgattcctgctatggacccatcacccttgtagactctgaggctgcaatgaaaatacaataaaatcagtaattctagttcttatggaacatacattctgggagtgggggcagagactaccgataaataaattagcaagagaatataatatgcagggacaagtgctatcaagaaaataaacctgcgcaatgtcacacagaatgcctgatgggtgggtaggtagtttaggggaagttactctaaggaagaaacatttaacctgagattggaatgataaaacatgtcaggtctgtgaagtctgggggaagaacatttacagcagagggaacggttagtgtaaaggcctttaggctggaacatgttgagcagtgtttgaaagatgatgaatatggctgtagcagaagaaatctggtgtgaggtaagatctgagaagtggcagggactgaaacagacagggcctgtttggctgtggaaagcagtttaggttttataaaagtgcaatggcaaactattagaacgtactaagtaaaggagtgacatgatgtgacttatgttttttaaagattactctgccatgttgagaaaatattgtaaagcagcaagagaggaggcagagagacctaatacatggctattgctttaattctgatgaagtttgattgtggtttgaactagtatagcagccaggcccccactacaggcccacccagcttgatggcctcaccctgcatcttgtcctgtctctgaactgctaaatctcaaaactttaaagccctaatatcttgctgattaaccataatttccaaatcttatgcttaagtccaggcagtttttaatttttttttattttttggcttcagcaaatttttcatttgtctatatctataaagtacttctcatcatcaacccagattcctttttctctctgttgtgttcattctagatcattccaaatggtctctgttccttctgccttcaacctggtcttagaagacttctctgttttttatctctcccccattccacctccaactcttgatcagcacctatttcaaactctcaacttggtctcctttttcactttttacacacttggattttaaatgttaccttcttttagaaaacaatgctgaccagtcatgagtttctttgaattcctccatgcttatccacatcagtccttactttaggggaatcccttcgtccctttgtttgaaatcttatgctaattatctcttcactcgggtctcttcccaaggtttggacatcatttagtgttctcattttccactggtgccattaatatcatcccgtcatcatagacatatatgtgtgtgtgtgtgtgtgtgtgtgtacatatatatgtatgtatgtgtatatgtatgtgtatgtatacacgcgtgtgtatatatatgtatatatacacatatatgtgtattgtgtgtatgtgtatatatatgtgtgtgtatatatatgtgtgtatatatatatatatatacctttcccatttcaaaaacaaaatcaaaacaaaaaaggcaattatctatgaacctgatttctgtcccttctattagcacttactgtccccagatgaggacactctttcacttccccatatgctcaaatatcctgaattttatactctcactgattttactttctaaacaaggaatatatacgtattgtagaaaaaaatcactgtgaagtaaattccacccgtgatccaaccctccagagaaaatcgtgcataaaaggtcccgcagattcccacctgtctttctttccttccttatctaccaatattttttcacatgcatgcaacattctagtcataccttgttatactttcagacatgttctttctacttgagcacatacaacatacaacttgagcatgcttgtttatctataaaatgaagataatatgatcatttctgtaggagttttgagtcaaaaataaatttatgtatttcaaatgcttagaatagtgtctgttgcatagtgacctttcaataaaaattattattattattgctcttttgtccactttatctacctggaaaagtaataatccctcaagactaagttgaaatataacatccctggggagtgtattagtctgttctcacactgctaataaagacatacctgagactgggtaatttataaaggaaagaggtttaatagactcagagttccacatggctagggaggcctcacaatcatggtggaaggcaaaggggaagaaagacacgttttacatgtcagcaggcaagagtgtgtgtgcaggcgagctcccatttataaaaccatcagatctcttgagacttattcactactgtaagaacaatatgggggaaactgtccccatgattcagttatctcctccttaataatccccttgatgcatggggattattacaattccaggtgagatttgggcggggacacaaccaaaccatatcagggagttatccttctcctctgccatcctgtttcactctgccaggctccttttctcagtgcctccacaagtggtttacttgttgtgatgaacactatgcacagcagagagtttaaggaccttagtcatgtttcctaccaatcagcggttggcttcctattaaacctttctcgatgttctggacctctagagagccattctgtgctgctatgcaatctataatgactcttcaactaggtttctattcatttccaagtcttccctaccactgagatacttcaaggagatatgagtggatcatgaataaatatcctaaaactaaagacagttaagtcaattgcactctcaatattatcagactattttaactaatatgctatagacaaataattcttcagaatggtgtttgctttgtgtgtgtcataagagattcttgtctttagagaattagggaataatattaaaatgaataaatagtaaaggtgggaatatttttaatattattaaaataaataaatgattaaagtagggagcatgtttgaaggtccattttaaaaaatatatgtagacagaggaaacctaagagttaaaatactgagtgagttttgctctgcatcagtggaggctataaaatgcagtatttatctgtatatgagttctataccaatgtgatctatctctctaattagatagtcaactatttttaaagagctgcaaataagccttacaagaatgtcataaatgcattccatttagaaacatcttgcagataaattgtatttttattcttcctgcagcctcctgtagccttaaaagaataacaaaaaataaattcttactacctaattccagacacagatcattactaccagtagtatgttaatcatgcttgccattccttctccttcgatatcattatgctttaggatagaaaaggtgggtggtatgtgagcctccttggataaacaaaacgttggagtgcacaggcttctcaagaggtacaatgttattttcatgcaaaaaaatcccaagtattacaaaggggcttgaaaatgttgaaaacacattgtgaataagtagaattactaacaagagcactgtatcttttgcttcgataggctctttcaagatgtagacaaattggaggtaggccagacagaatctacgggaatgattaggggaattgaaggaatgacttcggaaaaaagattaaaagagctaaatacgtataggttggctaagtgccaactcagagaaaatgacattatgggctatagatatttgaaagtggctggctataagcaaagcaagggattacttaggtaattggattaaatcaagggggtaaacattttaaactcaatatctggatttattttgttgactataagaattattagattttagaactatcccataacctactgcttggattaaagcaagaggtagggtgtggtagcatgaagtctctaatagtttacccagttctgagcatcttgttgccaggaagcagatcttactcacttttaatccctaggatttagcacattaaaagaactccatagagagctaagtcatgtttagttcagcgagaagaaaatggtctgtggagtcagacattacagattttatatctctgctgttttattgttctataacagtcagcaagttacttaacctaagccttatccataaggtgcgtattaatatcaactttataggattgatgtgaagtttacatgagttgtcttgatctcttcttttacctatttaacagcggttaaatacacccctcctctccatcatcactgccattgtgttccttctgactttagtaatgtcttcaatggtttcctggattccaattttgcctatcttcaagtttccacaatatagtcaggaataactttttgcagcgcatgtatgagtaagcaagccctagcttaaaaactccaatggatcccattgcctgcaggataaaatcgaatatccttaggatgacaaacttcatgccatcatgcctgtctttctaattccaactcatattaccctacccttctcacataatgctctaactacattcacttgcttgagtttttcttttgtaccttgtacaaatgtataaacatgctggttcctctgctgagaacccactttccactccaatttgccatttctttgccactctttgtcttctgccttgcttcacactctttctaaaatgccaatctcagattttacctcttttgagattccaggtgcctctcccatgtgtttccacagtaaatggagcttatcattatcctgctattaattctactgtgttctaagtgtcttttcactctgcctctcctaatagatgttaggattcatttgggcagatacttagattagtgcctaccatttagtaggcattcaacatatttttagattcaaagaatgataaatggtagatggatagatggatggatgggtaggtaaaaagatatatggagtgtaacaaagtacctacaacataagaaattatcaattaatttcagttttctttccttggagttttgagattaagaaatgcacttcgttgtcccgaataagcatagtcttgagtgggctttagtcagagttatttgtgtgcatttatgtcgatactacccactccattctatcatattgggaaaataatgcaatctcgaaggaataggagtctaggaaacctaggatataagtgagcacataccggagaaaaatatgccaacatagtagcttggaggaaatacttggaaatatcttgcctttatagctagatatagaacttcattttttacaactagaagctttgtgacttctgagaccatgactgaagaaaaatggaaatgaagacaaaggggactgaaatgggagtggaagtaggaaaaggggatccatagacacaaaacaaacttttccttttacacactccatttccctctctggtgcttgcccatggcccagctatttaaccttaagacacatggccagcccccttgtctagagtttgccctaattgttgggcgcattgtagcgtcttagatgatcaattgctcatgccaaaagcagagtgttaagattcatgaaattcgagtctgtgctattaataacctgagcagggttttcatgcctccttcccctttgttttctcctttgccaagtctccattctcactcttttgtggatgtgtgtgttatggagacgaatgaaatttcagacacagcaatgaattgccacctaaaaggatacaccccagggtcttctgtgttcctttgcagctgtgtgataaattgccatctccaaaattaattgttaccttttcaggaagtgtttactcattttcatctcctcactggcatcagtgaacctctgagctagaaaaaccaactttcctttcccttctcaagcccttgatatgcagctagaacggcaatcagtggagctgacaagggcgagcagtggtacctccgtgttgttctctagcccatgaattcaatgaacatccaggctatgcctttcatctcaactgccttttaatagactaacccatttctctttacttttggctccacattaaaatgtctataaaattttactccaagctaggtcttccaggtttacggaagaaggaacatacattcagcaaaacagttttctctttttgttagatttctgctgttctcaagagctgaaaaaaagtgtgatacttcacatgtactctttaaaaaacttactaagcctgctcagcttttacacagggtacgccggcacacaagtgtgacctggtccttactccatcctcaaagataagttgtccccacagtctgccaaaaagatgtccctgatgcaatgagaatgagctggagtcctgactgtgctacatttttagtggtatcctaactctctattccacagacatcagaaaatgtcacaacatactctttgtaactagtccctttattatgtccatgaatgtaatatatacaatgattttcaaagagggtgatttttcacccctcttctctccctgccccacatacaaaggagactttgcctatgtctggaaacatttttggttgtcacaattgaaaaggaatgtatggaggtgttgctgttatccagtgagcagaggccacagatgctgctatacattttataatgcacatgaactctggaatatataaatcaagtaaatctcagtattctgccatgtactctgggagatacttaaaattataagccatgacttctattttccaagcattttggagaaaaacaaccaattttgtttttgatttctgactatatggtagagttcagctacacagtatatggtactttaacaaagctatacggtagctgcaagacaacaccatggctgggcccttcagagcctcataagtgtattggggacactgagaatctagtaatagactaacacatatgtaccaccattgagtggcatcaaacatgctttcatttagtgctgaaattgatgatataatggaggctagaaagatctaataatgaaaaaaagaggaatttaaccagtcttgaggtgatcaaatgaggaagcagaaaggtaggattgattgtaatgtgtgcacagaggagtgaagcctgattacctgtactactcattgccagaccttcaagaatcgcgtgccaagtgccaggtgcagaagttgcaaaactgtttgggagatcaaagagaaaatatcaacctggctttcaagtcttttcagggtgctttcttagaaaaactgtttttggtcttgaaacatgggcaaacattggctgcgggccaagaaatttatagttcctgaggaactttagattgatacatgtctgacaatttccattttgcaaaacaagagaaggcaaaagtgggcttggaaggcattcaatctttgatgttgtctttgcttcagctgagcagaagtgagaatttagacacactgagccattaccagagtttaagaaaacttaccatcagtgtggtttccccctttctctcagtcaagcacatgggtgtgtgtcattgtaaaaggactataggattggaagtggacacgtgaattccatttcttactctccactaactacctgagtgacattaggcaaacttgcaaatgtggaagttgggccgggctaggttatgttccgctctaaccttaaacactgatttccccattgactttcttgttccattcaaagagattaggaggaaaaaaaagtggtatatcccaggcacgttttgtgatatttcagtgaaatattgaaataagcaatgtcagcagcctcatgttctcgctaatggtctggtatactttatgaataaacaacactagctttatattactggatctcatttccagcagatttataaaattgtaactctacagtgttttctgacagagcttctggaaggggaaaaatgacagtgcagttgtttgctaacatctgggtgtactttttgcaacatggggagaattgttccaaggcagggagctaatctgattcatatctctacctagaagcacttaaagaagctgtcagatgattcccacagtgacaaatttgagtcccaaggagatgatggagtgaaatcagacacattttgggaagaaattcctactatcttttcaaaggataaactcccacagtatttgtgccaatctcttttacagcattcctatctcaaaaaccagagacttaggctaattttttttgtttctgttattctctaatatatttgtttaaaaaggaagttttaatgaaaagtcagtcatgtgacttagagaattaaatgtagggctctagcaaggatttgctttaaaatgtttctctccgatttagttgctgcacctgggtaataactaccttggaagtattagtgttgtttctctgtcataaaattgacatgcttggtgtggataagaatatttgattgtagaactgcttctacctaactgcattctgttatactaacaatttggctagcagaatttttttttaaaatcctccatttgcagctttttgtactctgatcacaatatattaaatcccccagaagaactactaccttgaatacaaagcacatagcggtgctcttttaattgatttgtaaaggttagttgctcagtactagtggaaagtttcatgattacttaattgaattacctgcttcccccagtagagtgcttactgggcaccatacagtaagctgagagttttacatgcctggtactattatttccccagtttacagattaggaaagcaagatgtagcttacaaaatatgctgaaagaccactggcataaaagccttttaattccttgctgaaaaactccctgggttttgaaatatgataaactacatttttgttgttctctgaagattcaggttcatatagtatgacagttttatttttgtgactctcaatcatatatgagataaatgatgggggaaagagaccgctttgaggtcaagcagacctatgtccaattctaacatcaaggagaagccacgtgctttggcaaagtttgtgtatttacactgttgggaaaactaaaagtaatttatataaagtacctagcatagtatctggcagggtaggtgttcagtaaatgttgctggtattatttttgctagtgataacattattcagccatataaacacatagcactaaggttaagcaaaatatgtattgacattacagcatgcctaggtatttattgcctaaaatatatttccgataagcttttcttagcatttgctgctttctactaagagttgagtgaaactacgatgaccacaatttagtctacttatttaaacctttaattggttggcttccggtaaattgcagtttgaatgactagcccaatcatgtatgagtagccgggaatattcgataggtatagaattcttcctgcctaatcaagtcagggataccgatgttaatttctgaaataaatactttctcctctcaagatctacccagtggttcgttgccccttgggatcacttctacttttcaacaaagagcaagggacagtaattgcaacttcagggtagaaggagagtttgcatgcctggcccagaatgaaataaatgtggaggaacagagcccaaatgacttgtatgtttcaggtacagctccatgtatgctgcagatgatttgggttaaaaaaaaaaattggccagcctaaactttgaggcaaagaaattgcatttcccaatgtctcatttctctttccttttactttacttcatctactgtgaatgacccttatttttttgttgttgctttatggcaataaataaacgaacccccattgtgcaaatattatgctcttctcattggcctggagggaaattgctacgagagaaatcctggacttttttcccctttttagaaggaaataccaggttacgaatggcccttctcagtctctagattgagactaggattcttctgtcacctcctcagagccctggatgcagaaagcaattcatttcacatgtgtgcaaatcagacacagaaattctgcaaggcacctcttggcagtaaaagtggactattaactctcaaattgctggcctctactgagaggcaacttctccctgaagccaggtgggagtgtccctttgaagccttacacaacccgacttctgttgctagggtagagtactttagagcaagagtagtcctgcggtatgttaactgagtaggtgtttcccagaaaattaaaagcaaaagtaactacctggaacagtctgatttttaaagcaaagcaggatctttgtacgtttaaaatttagtccagctacttgatagcctatagagcccccaactccttcttccagcccagggagagtctgcagtgagcaaggtaagaggtagctccagcattttcagcatggggttaggttggaagtcccagttgacagggacagtccttcctgctctcacctgccaaaatctctctcctcccaggagatagctcccttttctccctgattgcttcctctcatgaggagaaggtcattggcgctcaccacttccagggcaaccctttatgcaagcagtgggtgcctttgaaaggcaaaccgcagcaggaagactttgaaggcaagaagagactttttcatctttgcaggccccagccagaacattggttctcagtgcagtacaagcagtttcaaagttatctcccttgctgatatggatgtgataacatggagcggagaggtgccataatgatttcctttcaaatggctgcctcaccatttatctttgcacactgtcaaagactgatattgtcgggagttagcagtggcatggaataattaatctcgtacgggggaagtaagttcttcatttgtctcctgagaaattagcactgcattgacagcaaaagtagatgatatcatcggaaagggaaagggaggtgatctttgtaactccagatgccaaattgtaacattgattcagttctgtgaagttttgattgaacacctactatgtgccaggtgctagagatacagatacagattcctgtgctacagtagatcataatcccttgagggtcacagcttatttcaaaatccttgtcaccttgacaaaatgctcaagaccaccatggtgacatgtgtgccaccatcattattattatctaaagagttttaccaagtgtctgtatcattaatatttattgtaaaggctcaacttttataagaaagaatccttgtctcccacaccaccagtgcaaagtagattaacaaagttggcatttatttattttattttttctttaggggaaaatcaagaagttagtgatctagggctaatggggatattgtgttactcccaatatgtggttcccatatttggattcaagtttttcctattttccaatcagtgggaggagaaaaagaaaagcatgcctgcttatatcctattaaggccacacctgtctgcaaaacaggtgggatccatgtgaaccagaagcaagctattaaggatgcaagaaaatgtagtgactagttggatggccatataccttgcttaaaaccagttagggtcttttatttctgaaagaaagaagggaaactagatatttggggatgataagcaatctccccacagagattctgggtgaaatcctttttgcttctctgaatttccaataactcacctcttaaatgagagaattgaaggaggtgtgctgtgtagtccttttcaatttcaaagtcaaaataacaactctaggctcctcctccttcctcagcttctcccaggcagtaggcacagtgatgggctctgtgctgggaattttgttttgagcctgtttcttttatttggaaacatcaggtgctgaacctatcctggattcgagtgagtgcagggcatggctctaagaagcattttgtggaaagagtcaagcttgtcatcctcctcctttgaggcactaattgggctgactgggccaagcaaaacaatggtatgatccatgtgaaccaaaagcaaattattaggcttggagagtggtgggtagtcagagaagcacttctgttgtagacagaaaaacagcatcatgcttctcagaaagaaagggggctgctatctgggtggaaagcttagaatcaagggagaattatacatgtttttaatggaccgaggaagaagccagatttgtgtatgcggagtttgatagggaagggcttctcttctttttcctactaaaggaatagtgtttttgacaaggtgccaaaaatctaggccacagcatcccactttgtgccacagcatcccactttggtgagccataccaggttgcaggaaattaattgctttagactttgggctggctgagtggggcctgaagccaccgtagtccctgggcaagccccctcccactacacaggcctcctccatctccctcattttctctgtgtgctgtgatttggaaaaaattgacaagcacttgatagaggctaccaaccaattagaattggttcacacgagacacttgggaatgaactcagctggtcactatggtgatttaactaaattgtgttatccagacacattagtgaatcaagtctggcatttcaattttctctataagatgaattgtggaaagaagttcattataataattaaggaagatttatgcagtgagtacatttttatctctgtagcctgttataatgctggtattttgtgaccaaaaaaattgagttgtagatattaactatgtaattccacaaactgtgctcccgaacgagttatttatatagttagaatttaataaatggaaactttttgaatgcacctgcttaggaaaatattgaaagaaaacttactgtaagtttttcagcacagtgaacaatcatcccccagtgaacaaaatgctagccttaacccggtcagtaaattatttggccataggcagatatctcatctccctgtaaaggaaagccagtttcctccactgtaaaatgagtcttagtaggaaagggggcattagcaaagtaatccctgtgcctacccaatcgttctaatgtgatgtttcctttggaaaaaacctacaactcagaaatatattgaatgaaaatctccctattacaggaagacactgcgggttgctaaggagtgtggtttctgtggttggagtagagaaaaatagtggtgttttctgagatctcaactcaactgtgcagggtagatcgaatgaacacagcacaagccacagccactgttctgcttctgcctgatttgcttctccagaaatttcccagattacaacaatgccgaagtgcccattggctaccacggagataacttcataaattgttaaacaggcagagctcaggtttaaagaactgcctttattttgagctgtgattttacttgtgtttcagacattccctcagatattttatttaaaagatttcacaggagcatcatgcaaaatggtaaataataaaacattctataaaccacacatcccatctaggactaatcattatattttccaatttaacattcattccttccagatatgttcttactcgttctttaaaactatcataaatggaaagctaccatttaagcacaaataaaactcttaagaaagctaagaaaatctgaactcattaaatatttctaactagtgaactccttggttctccaaatgacctattttttcccttccttcttttttttttttttgtatttttagtagaaacagggtttcaacatgttagccagcctggtcttgaacacctgacctcgtgatccacctgcctcagcctctcaaagtgctgggattacaggcgtgagccactgagcccaccctccttccttccttttttaaattagaattttttattttttatttttttttttaattttttttttggttgcttttagccacctcagttaccttgaccatccgatttcacttactgtagccagatttctaaagtatgtgtttctgtggcttttccatagtttttttccccaatattttggcagtggttgaatagaatccttttattcctccctccctcacccctcccaatcagctccacctatagatatagaaatacaaagtgaacaaatgtgccatgcaacttctatttttgtgcccgttcttcctctttgtctctatttttgcctctagcacatagtatcctggtaaactggatttttttttaagagacatggagaacacagtgcagtgctcattctctctcagcctctctgtttttactgtaatgaatctattctacataccatgttctcaggatcccactgtatgtctgataaactaagtcaagctaaggtcattattaccaataagtaatcaataaactcaatgtttaccctaagtttgatacggtaacttagttattttaagaggaaattttaagttcttgtgtgtgtgagtaagaaggagcatgagaatagggaaagggccgtttcacagaagcggtcctatctggttggcctcaattgtgcctctcaggcttgtatctcatctgcttagctgtaaggccagtcctgttaggcaagaaaaaatttaatttgcaacctagtttatgaaaggataaattaagggaccttgtgggaatttaaatcatctaaggtaatagaacatgaaacttgcctagattaaaaactgggtcttttgtgaggtttcattcattatggccccataataatagctacatgtctatgcacttttgagcttgggtctgtttaaaatacttatttgttatttcacttaattcccacaataactgtacaaatatggttctcttgcctccatcttatatatgagaaaaattaggaacaaaaaaacttaagaaatttctttcactttctatagctgataaactttggagatcagtttgaacccatatactcttaaacactatttatacagtattaatgtgatttgacaaaagtggcataaagagcaatgactctttaagactcaaaagaagatgttcagatttatattttgatattaatattaatatcagcaagataagctgttaaataagcattacatgtaagaatcctgaccttggataaaattaaatctttgtcataaatctactactgtgacaaaactgcaaaatatgcagtgaataattaaatccagatgtctcttccggcaacagcagcagcaaaaactggaggtgggggtgaagggaagatggaagtgacagactccatattcataaaagctctgatgataaatttttttaaaaaaatgtgtttgttttaaataccagtcttccatgaatcctaagaattgcacagtaaaaaataaaatctgcctaccatttaacagcccgcaatacaaaaatcttactgtgtcaaatgtaatatgcatacctggcttcccaatttggttttcttaaggaggagtaatttagttgtcattaaactctttgggaaaccgttttaataatgttctttggttatcaggggtatcctttttttccttaaggcaaagaagagaaaacgtgccgctaaaacctttactgtgtgtggtaatgaagttggtccatttctgtgcaggattgcaacaattctttatcacttaacacgatcggaggtgtgagagcagacagtttctcaaactgcaggaaaatgctgaattcaccgattgctatcttgacacaatgaagggaccatacattatatgaagcccacatttggtttgctgttgttgttttttttttttttataactgtgattattttttgatggaataataatcacagaaaaaagaaaaacctgtaagagaagacaccactgtatcatctttttatggcaatatgcaagagggtagaaaaaatgagagtgtctaaatttatcttattttcctgtgggattttcagcacagacatattcctaccactacaaggaccaaggacattcacttgcctgcttgctctgataatggccagtagctggtcccaatgttgatacaattaattaaaatgataaacatgactctagctagcttcagcacagtaagagtaccacagcattttctggatcatttattcaagattcactgacttggagtcactgatggtaccaatcattttatgaaataccttccactagagacagaaaaacgttgttttgacaaattcatggtctgcacctcccccaaaccagtgcatttctaaacagacttgtttttcctctaaatagctttgccaatccggccaacaccccaatatttctttatattttgaaaagtaggtctttcacctgctgataatggaggatccaattctgtgtaaactctggaattctatttaaaattgcagattttaaatgtagggaccaagacaggatgtaggttgtgtcaacttgggaatgctgaatgactgaactgtcatgacatttacaatccagatgtcatggcaagctgggagacaagacagcttggttgataattagatggcagatgtccatgcagtctcacgtgatacacgttactttttgtatattcaagatttgggactttagccctgaaagataggtgatacatcatcttctctatacaataaaaaatagtttcaataattgtatattattttgttttgctttttttctcatttatttggaagtagcaaatacaagaaacaaaaattactcataacccctatttttggtgtatctctatgcaggcaaatatactgatgatgattattttcattttttgaaaatttagattctcacactcaattaaaaaaagaaagcctgaggaaattaaatgatttctaaaatcacccagctaattagtggcagaaatgagaccagattccagtctcttgctttcccgaataccttattctggaattcaattataagtacaaggcatcccactcttggcttcctttctgaataaatgcttgcaccaaatccccagtggcttcttgagaaagctggctacaaatcttcaaagcctcagttgaagaattcttattaagcctactaggtaccaaagcaatagcctgaagtttggaaaaattctagttggtgaagctagaattttattcaatttaaagaatacttggtaggggggaatgtaatgaattcactccctagcctttcttgaactctacctatttaacaccctatttctaatacagcagcttctcactatagaatgttaggtttatcaaatctctcttccaccctgttatacggcattttccatcccttggatgtttcaagtccaggaccttgggcttaaaggcaaaagtaaaatctattacacatttgtagctttgtacaccaatcagggaaaagtagtaaagtgggctattatgtacattattttacaatgcagtatgttagttgtcaattgttacgcaagactaattttttccacagcaaaaaataaagctattttaaaatattttggaagcaagtcatggttgaagagaagcatcccttgaaaaattagacttaaagctgcaaacttcccggggttgacattagcttgaacttgatgaaaaaggaaaaattttaggaggatttgttcagctgtcttctgagttatgaaagcaggaagaaatgagttttacatattgcctggaggtaatttgtgtacatataagtcaaaaacaattaaacttcaaacttcacacacagccactgtcctgtaaagggtggtagtgtataagcagaagaaaaatgactagaagagaacagggttataaagcatccagacatttcccatgtgaggatcttgaaaaacttctgcagccctgtgactggattctttctcctgatctaatagggctgtttggaggaagtatttctactgctcttgagttgttgctagttttcctttgaatatcctgctcagttccctgccccagttcaagcttccttccaaaatgtgtttaaaataattagctcttcctgttggtataggaaaaaattagtcacacataattggtaattcacatattgtattataaaataatgtacaaaattaccacccttacttctttttggagggcctgtggcttgtaccaatggatttatcttgttccagggcattgagaaattttgccttactgatggcatcaccacttacatttctcaacatctttgcctcccatcagaccaggatttcagttactaggtatcctaccttgttccattgatctgagaccctcattaataccctagctgacagtcttaactcagcactgtcttctattttctaccaaatagaatacaataatcagatacattttactctctcttctgaataaagatattaacaaaatttccatgagtacttataagggtgagtttccagaccaacctagatgagttaccaggatatatagtttgaaatattaactttaaacatttcttgatttttctgaccccatcaggtattttttggaaactggtattaggcttgtagaaatggacaaggagctctaccatgcttgaagatggtttaagccttcagcaaaataattgagagcttcctcttctgaatattccgaatacacaggtctatcagttagtgtatcatgttatgtgtagatgtgtgttggggtgatcagatccaacaccaggtcgtgggggtgacaaaggccggcaattcaaaggaatgagaaaaagacagtttgagagagaaagtgggaccagggggccatcgcgagtgtggaggctgtgaaggccccaagttctgggagcccatgttatttatgggtgctcaaacaggtggtgaggatgtcgagtgaatgagaaacatatggctgtttgacataatgggagtactagaagcaagaagccagcaagtctagcagacatgcaagccctgcctcagcttctctcccaacactcagcttttctccaacagatgtgtatgaataaggcttattaataacaaagcctggctccacaggtgagagggaagatgtaacttaatctactggaagtcaccaacatagccctctaaaatgagtcattattttgactcaaaaatgaacagattaaaaaatgtttcagctaatcctcttagctatttgatgtacatcaagcatccagatgttcacaacatccaagctgcaattttttgtgtgttatttaaaagttttacacttgcatatattattcctttcctcaaagacaaagtatagaacccaaactggactttttaaattcactccttaaaagtgtggtaacttaccattccagagctggtgggtccccgattattggcccatgggttgtccactttgtggttttgctgttaggaaatgttggctgatggcttccttaaccactcagcagttaaccaacaataacttggaatgtgtctaataagtgcagcctaatcttaattttattgggagttatctcagctaaataatggaaaatttgacaaacctaattaatgaattatccactgttaaatcttctgtgccactgagtcctctttttagtaaaatgattaaaaacattaactatagtggtatataattactattaacaactattatgccaatatatattgttattcctgcctaagatactatgtctcagcacggagtttatattaggtattttattttaacagttttctaattgctgccactttttcgtcagattgcatattttgacccacaacattgatttcaccttaatgtcaccagtgggaattaattatctgaagcttggcataatattaattaaatccatatgtcacatcatggtgtggcattcttttctttctttcttttttttttttaagtcagggtctccctatattgccatgctggtctcaaactcctgagctcaagcagtcctccctggttggcctctcaaagtgctgggattacaggtgtgagccaccatgcccagcccattgtgcagtgttcttacaaaagtattctaacaatccaaaatcaagactacttccaaaagtggcaggcttcatatagaatccaacattctgttgcaatgagattgggatgagtgggtttagaccaacattgatatcaaaggccagtttccctttaaatcaaaatcacctgtaaactagcatcttgacattcaagatcccaccagggggatctagctgggaatgtcaccatgcatgtcttgagagagtgcattagcccacctgcagtaggttgaaaaatatcttccaaggataatttcttaagctgtatattttaccttatttagaaaaagggtctttgtgagtgtgattaagttaaggaccttgagatgaggaaataatcctggattatctgagtgggccctaaatatcctcaaaagtgtccttataagagtgaggcagagggggcatttcccccgccacacacacacacacacacacacacacacacacacacacagaggagaaggtgatggaggcagatactggagtgaagcagccacaagccaaggaatgctgacagctgccagaacagtcaagaaacagattctcttttagggtcttcagagagaatgtggccctgctgatgtcttggtttcagctcaatgatactaatttcaaatttctggcctccagaactatgagaaaataaatgtgtttttgttttgttttgtttttttgagacagagtttcactcttgtcacccaggctggagtgcagtggtgcgatcttggctcactgcaacctccgcctcccgtcttcaagtgtttctcctgcctcagcctcccaagtagctgggattacaggtgctcaccaccacgcccagctaatttttgtatttttaatagagacagggtttcaccatgttggtcaggctgatctagaactcctgaccccaagtgatccatctgcctcggcctccccaagtgctgggattacagacatgagccactgcgcccagccaaatgtgttcattttaagtcactcactttgtgccaatttgttatagcagccacaggaaactaatacaatacttgtgccaacttaagtaacagcaccagccaaagtacataaagtggaaataaaggtatttttagaaagtctcattactataaaatatggtgtaaataaaaacagatctgaatatgcaaattgaagtttcaaaataagtctcctgccatcccatttcaaagacactggaaatcttaagctcttttctttacaaattctgaaactatcattgcctgtgggttgggttgaaatgaaggcacgtgggtgtttcaagggtatgttctgtgacaaagagacagaatagaaaaatccaaagtcatagcctggagctaatacagtaatatgaatacataaaacaggaaggacaagaatataaaagtgaatttggggacctgagaaagtcaagaaaatgattggagaaatacaatttgggagaccactttagaacccagccctcactgggcatggtggctcacgcctgtaatctcagcattttgggaggctgaggcaggtggatcacctgaggtcaggagtttgagaccagcctggccaacatggtgaaacccgtctctactaaaagtacaaaaattagccaggcatggtggtgggcatctgtaacgccagctactcaggaggctgaggcaggagaatcactggaacccaggaggcggaggttgcagtgagctgagatcatgccactgcactgcactgcagcctgggtgacagaacgagactctgcctcaaaaaaaaaaaaaaaaaaaaaaaaaaaaagaacccaggcctccaatggtgcgatcaggtgccaggtactcttgtctactgtgctgaccatatgctgttgaggtcatcaccagctacgggaaagggcattctcataggggcaagcccaactctatgtatcttacgttatttaccactatttcccaaataaacctgtttcaaagaataccatctttaatgtctttcacaggtacctatcctccactctgcatccttttccatgctatcacttgcagtgaaggtctgttcaccccttttttaacctgtcttccatcttgagttccaatttccagctgccctctgaatatgtccagaggatgctggctgctgcctcagactcactggatgaaacagtttcctgttttctttactaaaactgccaaccttccttttccttgtttgagttagtgtatcactgtcctctagcccctgagctgaaaccttggaatcatctttcactcctccctccccctttatattcagtcaactgacagtaccaatatttcttctcttctccttttatttcttttgccactgtcctactttgggcactaatctctcttctgaagtataacaatagcctcccaactggccactctgctttagctgctccatggtccaatctcccttgtcacatgtgttatctttcccaaacactgtcacaacttgtcagtctactgcaaaactttccgtgactcctggggggcctgcaggagagagtttcagatttctgagtctgccttcctggctcttcacaatgcagcctgagtccatcttttcaaccgtctctctggatacataccaacacttgccctttgtctcaatgaatgtgcctgccacttttgtatctccttacctttactcatattgtggtttaactatgtggttgtcttctccaccctgacaatagatacatctattgtccatcagcccaatttacaacttttgcatctcttctgatttctatcctctgctaatgacacttattaactactgcctttccactggactttgcatttagttttttatatatatatatatatatatatatatatatatatatatatatatatatatatataaccttacttctgcttttaaacatagatcattatttccatgtctaccttccactttctccaacactagattgcaaatttctacagggtgaagcttatgttttcatcccttaacacccagcttaaatgtcacctcacatactgactaatgctttttatctcagttctaaaacattattaatgtacatcacataatttaactccattttgaaaattagttcttgttccagtatcttatctcttaaaatagactggaaccatctcaaggttagagaggatccactatattaaattcttatatatccctcagtagatggcactttgttggatgatttaattgacgtatcttcttaaaaaataaaaatatctggctcttcaaataattagctttgtgacctgaggcaaatcatttatcctctaggacatttagtttactacatggtgaaataaatgataccttcattccttaaatatatagatccagtgacatgttgctttgaatcacagaatttggtttcgtgctaaatctaagaccaaaaacagagcacaaacaattcagaatcaacagcatgctttctggaagcaatatgaaaggtgttattaatagaattcagcattattctaatttcctcttaaaatttcaagaaatatatctgacatttgtcctgtcattgtaagttgaaatatgtgtgtgtgtgtgtgtgtgtgcatgtatatataattttttgttgttgtttttgagacagtcttgctctgtcacccaggctggagtgcagtggcatgatcttggcttactgcaacctccgtcccccaggttcaagtgactctcatgcctcagcttcccgagtagctgggattacaggtgtgcatcaccacactcagctaagtttttgtatttttagtagagatggggttttgctatgttggccaggctggtctcaaactcctggcctcaagtgatctgcccacctcagcctcccacagtgctggtattacaggtgtgagccaccatacctggccaaaatgtgtatacattacacacacacacacacacacacacacacagagtatgtatacgtatatatctgtatataggtaagtgtgcttatatgtatatacacagacatatacacacacaacatatacatatagatttgttgtctagatattataagagtattgcactaatgtttctataaaacaccagttcacaggcttctgtcttctaacaatatccttatacatatttgtcagccactatttaccttaaaatgaaacagaggggagcctgatatataattacggtcactgtgctttgttctattttgtttatccctttgcaatatagtgtggcagacagaaaaatgtatgaaattaattcttttggtttagaatgacattcctatcattgttagaacaagggattacattatacactacctctaaactcaaattttctgagcactttaactattaaatagcaataacagaaagcattgtaaatcttttggagttttgcatgataatgtacctcttgttaattgaattgagagatgattgccctatgattacctcgattcatttgctgcataatttaccataatgataattaactccttgtactgaatgaggtaagatgtgtgttagttagacaccccctccctcccttcttgcctttccttctttccctccctattttagtgtttaaccattttacacacaatttgagacttgtttcagaatctctccacctatattatcatgtcaatccaagtatttctaaataaaagtagaagttgggccatgtttttaaaatttctagctaattgcctgctacttggcttattgttgtgatctaattatgttctggtttttgaaaaaaggactattgcctggcccactgtatgacatttgatttatgtagtctcacctctccctaaatagcccatagttcacaatgcagcagagcctatattaccgcaatttcttctgcactgaaattagacaattatgaagttagtagattattaaactaacgtatgctttataaatacttcttcattctaggataagggagaaggaagtatactgtaattcccaatatgtaaatgccctcacacatttgatagttgatggttccattttttagatgaaaaaactaaagcacaaagaagataaacaatattttgttctgccctataataaaataagcaggcaaatatttatggatatgattctgggttgcctcaaaactttcagggtcagggtaggcaggcagttggagatatgagataatgttagccatgaattgtggctatttttgtggcacctgggtgatgagtccacggaggttcatcacatgattttatttacttttgtatgtttcatattttctataataaaggtattttaaaggaatatatttaggtatccacagtgtgtgacacctgtcaaggagcacatgctagaggcctggctctgccagtgacataggctacgtgactgtcggtgggtcacaacttcctagacttcatttttccctcattaaaatcaaagtattagaagagatcagtggttcccaaggaggtggagttgcttagggaactgtctaaaatttcactgacaactcagaaatctatttggatttagaagctggaggggaatgtatatttcaaaataacttctcaagtgactgtactgtgaccattccttacacacaaacttgggctaacaatgagaatgacttaaccccccaccccacaacactttaataggtttaggatgggttctgagaaataaagatttttaaaacattccccaagtgattctaataggtggtcgacatgccatactttgagaaacacttttttagctcatctcagggtcccttccaactctgacacctcatgatattacttgagcattcttggttctctgcttctatgatgtactattccatgagcaactggagatttagttacaggtgtatacaagtgtacaggagtcaagaaaatgatgctaagtttcttgcactgactgaggaagcaaggtagaagcagactctggcttaattggaattcatgtttgaggcctctgggccctcactaggaaaaatattcaatttatatgtaagcatatgtataatacacatatctcaccagcattctttttgggaaaagagaatttccaaattaaatttaacctatcaattttatactgactaagatgaacacattattttaatatattgtttcctcttgcttcctaatacttacattgtatagagtttcattctttatgctaatcctaatgcatagattggtaaattgagattaatgagattcttcctttactaccacctgtttttaaccaaatgcctacatgctgcatgagcaggaaatgaggtgactactgttgttggccacagagcttcaatatgtcgtgaacaagggttagatgtgaatgtcagaaaaaatgttatgatcaatttctgcctccaacaaggaactacaaatatgggtcacaaaagttctactagtagccccaaatacattttttgaaaggagacaatataaataaagctgaaaagcagtcacaacgctttaatgtgtcattctcttcttcacctttctatccacttagatgtttcctaccccccaaaaatgaacttatgtcacatcacacttgtgactcccactgacatctaaagtagtgtgagccacacagatagaagcacaggtaaatgcctcaaaacctagttattatatttgaaggaatttctgattcagtagtgtttctgtaattgttactaacatcaacgcttcgcttgcttctaggaagacaggatggtaaattcctaacaatggaattgcaaagttcacagtgtgctttaaggagtccctttctccataaacacagctcttgtgatggctttgcagattttgtttctgcatttagtgtagataagttgaacaatcctaattcctgagttctaactagtgatagagcacattatattgttaagaataatggatgttggagaaagtcaggacaaaagtaggtatgaggtgtccctggtatgtggccaataggaaccacggtcctgaagtatccggagcagtccggacatcctcaagtagacccaaatcagccctatcaggagccaacagaaaagcttgctagggcaaggtcagaagataaatttattagccaggaccagtttaagtcaaaagttgaatataagtcatatctttagaaaaaaaaaaaaaaagcaggtagaaaggcacattgtttttagctaactctacaaaaagttcagagcgaaaagaaaaacagtgatgcagaactaggggagaaattaaggagcaaacattccaaaaatagaatgagttgtacacttggttaatttcattgctcagtgatgcctccatagaccagattcttctctctgccatcctcagaaataggctctagggatgctcttagataggctattctgtatgcaagaccttctgtagctgttctagatgccagatcctgaaatgacaacattcagtgaacaataatagctcttcttctacgtcatttccttagatgtgaagaaaccatttccagcaaactcccctcatgtccacaacacctcattaatcaggattaaatcatatgttcatttctaaaccaataagagaaaaagaagtatcgtggctatattatactgaaatgcaattgattttggagagttaaaaacaaatccaaaccagcagcagagcctggggagaatccacgtctccttctcaatccacaagacatgatgggtctgctgcagtgtggtactaaatttggggttacaagaaatttttggcttattagtttcctagggcttctgtaattaagtaccacacactgagtgccttaaaacaactgaaatgtattatctcatagttacaaagtctagaagtctcaaaacaaggtgtcagcagagccatgctcccccctgcaatctgcaggggaataatttcctcttcctagtgtctggtggtttgcccagcaatctttggccttttttggcttgtagttgcttaactccaacctctttcttcctcatcacatggtgttctccctgtgtgcccctttcttcatatggctatcttcttgtaagacactagttatattggcttagggtctcactcaactccagtatgatctcatctaacttaacaaattacatctgcaaccttcctatattcaaataacttcacattctgaggtagcggggattagaacttcaacatatgtatttttgggtggaacaaaattcaagccataacaggcttctatagacctctctagttttactcagtctagatcccaatccatggagtttgaccaaatgagttagggtgctattccctaaacttgctgaaacataataattgctagaggcccttagtaaaatacagattcctggccctcacaacagatgtactgaatcagtctctctaggggacatgcctagaaatctgctttttgacaactgcccagttcaattttatgatgaagcaagtttggaaagcatagagtcagggtgctgagcactttttgagcatctttgagcactttttgaccatgttattcctggctgtgaaagaattctttttgtatgaaatctcatctacccataacaagtcttggaagctgctcttgtcatcctcatcacagacctgcagaaatggaggttaggtaagagtggggctggaaatggagctaggtccaatctcaaaatacatactttttcaatcatactaactcatcatgttagtagtaagttaaagaatcttgaatcatatggtccactgtagtttacttttcttgccttattcccaggagttttgtttttatttgttcttgtccttggagggaacaaaagacagctggtagctgttccctgtttggttttgcatgtattcaaaaggcatcatcttctactgctctcttactcctttactttgtggtcatttgttttgcagctatttagacagttacttcttaaagaacccctaaaactatttagacagttacttcttaaagaacccctaaaactatttagacagttacttcttaaagaactcctaaaactaccatttgttcctctagaaaggattaaagatttgctgaagcaaagttctcctgacactttacctagagcaaggctgaaacaaaagctacctacacctgtattttccttctcttatccctcaagtacacaatagggcatttggctctcagcagttgatgccaagttctgctagggaagaaatgagacttcagagctccctacaagttgaaatggagtcagaaaagctacatatataaatgtcagaaaagctacatatataagctacatacataagctacttataaagtttctgcaaaactacctcaaagggcaggtagttttgcagaaactggagggacactgttttctggagcactctgccactaggattttacttttagtgtaatgaaggatcactgaagacttttaaaccagacggtgacatgataaaatttcatttcagaaatttcatttctgaaaattatgatggctgttggaaaaaagtagattggaagaagcaagaaaatgctaggttacttcacaacttctccaggaaaatagtgcagtgggagaaccctgaactcaggaaatatggcccatttcctgcactatgtttcccaattcaaaatatcctattgtggaattctacagctcaagtcaagagccccttctgaactacaaaggacaaggactgatctactaaagccgtgtagtaaatgtgaggaatttgcctaactcagccaattgatgtgtcaaaatctaaccaatgtgtctaataatctaacatatattgttattgatttcaggttttaagaaccagttttctaaaaatgaaaaacaaaatcaaagcactctagaggaagtaatcatatgtttaatgtcataagtcactgattgtatacttaatagtaaatggtggatatgaacttgggccctggagtcaaacttaggtggctcggtcatgcccttgatgtgtgtctttgggtgggctactgaaactctgtcttagtttcatctataaaatagaatgctaacatcgactttatagggttattgtgaactctaaataagacaacaaatggaaacccaacacatgttctcactcaaaagtgggagctgaacacgtagacatggggaggggaataacacacattggggcctgtcggggagggggagggagagcatcaggataaacagctaatgcatgtggggcttaatacctaggtgatgggttgatagctgcaacaaatcaccatggcacttgtttacctacgtaacaaaccttcacgtcctgcacatgtagcctggaacttaaaattaaattaagtcaaaaaaagctaaaagcaagctttatgccaaaaaaaattttaaaaacttaaaaaaaagcgcctcttaaagttataagggagggtacacagtaagcacttagtgagtgagtgttgtggttgctgtttttcttaataaacatatttttatccaaattattaagcagaaatattggactggaaaagggtaaagtgtggattattaacggttgacattggaagagcaaagagatagagatgttccatgtggttcctttgccaagccatccagatactcacctccatccttttggtcatttcccctaatacacagtatatttatgatccccttctgacaaccccttgaagagttgcttgcctcctgcacagtgctgagttatggacgatgcatttgaagccatatattcactctgtcttccccacatgtgcctagtaactatggcagagctcaataaagaagaggccagtggcgggtttactcatttttaaaaaaatttccttgttgttcttttctgtgattgtaatggctagcactggtactctttccctctctctccccttcttttgccatagagctattgtcaaatgtacaaatacatagtgaattgcgatggtttctgggactgacagagagaaggaacctgttttccccataaatgctgtagaatgaagggtttgcaaacattgtgattgtggcagattaaaaaaaaaaagtcaagcaggctaaattgaaagggaggcatgagaaaagctggtgcaacctgtcagctcctggtccgaaagaagctgatggtattttttttaatattgtgaagagaaggaaaattttttatagtaagtctatggatctgctttaggaggcttttctcttgatctaattgagctgtttgaagtgtgcttgaaagttctcacccagcctgtgtcagccacctgcctgctacaagctgtgagaagttaatcgtcttgggcattgttaggaggagactgtctggtatctgatggctttccattctgaacaagggtgtacggatatggaaaatgtgtgtgctcacatttgtctttggggtgtggggctgcttcactatgcatgagagcacatccacacctccatccagatggtgcctgctcatagtggcagtgctagataaattcatgtcaaacaggcagataatccaaaaaagcaactgtaagtatccacattgctgttttctgcttccaagcttcagtgttgtttttttttttgtagtgacagggtattactatgttgcccaggcttgtctcaaactcctgggttcaagtgatcctccagccttggcctcccaaaaatctgggattataggagtgagccaccgtgcagtgcctggttttttaacatgctattcccttgcctgaaacaaccttgccatttgccatcaacactggcttcatcttccaatctctttgcctgttgcctcacattggatgtcaccaatctgggaagcctttgtcacccctcaccacattgaggtgaggggtacctcatattctctccctgttccttgatttcccattcaaagcacttaatgcaccaaacatttttttttattgcatgtctgaatacattccttagtagttcaacattctttgaggttatatcatgttcatcacagaatttaaagcaatctcctgtgtatagcagattgacaataaattagctatgaaaacaaatgaataactatggtttgggaagaaagacattgtctgagcacacagaattctaactcatgacttgtgcactgtcaagaatcacttgctttcagataattttgatgagtctgattttacgcttttcagtttgtatgtctcatgatttgtccttaatagactgaagaagtcctagcccttataattgaccagtgcctggtaggggaagggcagcagagaaggactggattagaaccatctcaaatgcttctattctgattagtacttagggttggttggagagtaagaatagggactcagcctagttgaaggaaagcctgtatagtggtgagtctgagtgacaaaccagggagaagtaataagacaatttatttctatttttttatcctacacctgaaatgtaaacaaggacacattaaatttttactggttagcattttttaagtaattatgtgctcaactatgtccttatatttgcattcttaccaatgtagactctgttatggaagtaacccatgctgctgctgcctttggacctgaatctctttttgcccttgtcccatttgtgaatttagactttcagcaagttgtctttatgattctctattctatgacatactttgtgaattcatctgtaatcaaatctgtttgatgaaggtcacaaaagctaagtcaacatgagacctgaaagtagaacctgggggtactgattttcctacccattaggaaacagcctccccacccaatcagggcaggttatagtattcaatgccatcttgtcttattgactgagtcatacatctctcattccgcaaagtcagggtcctaaaatacttctgtggagtcgcaaggactcttcctcattagccatctttgactttgtcattgatactattttctacctgtttctgataattaaaaccccccaaaaagtaaaatgtcagggtgaccagagagaaccttagataggacagctaatctcttgcttctagagaaaggtatgaaaatatactgtgcttattatggggatgatggtatgctctctgaattgaaccttaccttttaacatgaaatttctaattgaaacaaagctgtgatgcctccagctttgttcttttggcttaggattgacttggcgatgcaggctcttttttggttccatatgaactttaaagtagttttttccaattctgtgaagaaagtcattggtagcttgatggggatggcattgaatctgtaaattaccttgggcagtgtggccattttcacgatattgattcttcctacccatgagcatggaatgttcttccatttgtttgtatcctcttttatttcattgagcagtggtttgtagttctccttgaagaggtccttcacatcccttgtaagttggattcctaagtattttattctctttgaagcaattgtgactgggagttcactcatgatttggctctctgtttgtctgttgttggtgtataagaatgcttgtgatttttgtacattgattttgtatcctgagactttgctgaagttgcttatcagctgaaggagattttgggctgagacaatggggttttctagatatacaatcatgtcatctgcaaacagggacaatttgacttcctcttttcctaattgaataccctttatttccttctcctgcctaattgccctggctagaacttccaacactatgttgaataggagtggtgagagagggcatccctgtcttgtgccagttttcaaagggaatgcttccagtttttgcccattcagtatgatattggctgtgggtttgtcatagatagctcttattattttgagatacgtcccatcaatacctaatttattgagagtttttagcatgaagggctgttgaattttgtcaaaggccttttctgcatctattgagataatcatgtggtttttgtctttggttctgtttatatgctggattacattgattgatttgcatatattgaaccagccttgcatcccagggatgaagcccactcgatcatggtggataagctttttgatgcgctgctggattcggtttgccagtattttattgaggatttttgcatcaatgttcatcaaggatattggtctaaaattctcttttttggttgtgtctctgtccagctttggtatcaggatgatgctggcctcataaaacgagttagggaggatttcctctttttctattgattggaatagtttcagaaggaatggtaccagttccgccttgtacctctggtagaattcggctgtgaatccatctggtcctggactctttttgcttggtaagctattgattattgccacaatttcagatcctgttattggtctattcagagattcaaattcttcctggtttagtctgttttggttactgcagcctatactacaaggctacagtaaccaaaacagcatggtactggtaccaaaacagagatatagatcaatggaacagaacagagccctcagaaataacgctgcatatctacaactatctgatctttgacaaacctgagaaagacaagcaatggggaaaggattccctatttaataaatggtgctgggaaaactggctagccatatgcagaaagcagaaactggatcccttccttacaccttatacaaaaattaattcaagatggattaaagacttaaatgttagacctaaaaccataaaaaccctagaagaaaaccaaggcattaccattcaggacataggcatgggcaaggacttcatgtctaaaacaccaaaagcaatggcaacaaaagccaaaattgacaaatgggatctaattaaactaaagagcttctgcacagcagaagaaactaccatcagagtgaacaggcaacctacaaaatgggagaaaattttcacaacctactcatctgacaaagggctaatatccagaatctacaatgaactcaaacaaatttacaggaaaaaaaacaaacaaccccatggaaaagtgggcaaaggatatgaacagacacttctcaaaagaagacatttatgcaaccaaaagacacatgaaaaaatgctcatcatcactggccatcagagaaatgcaaatcaaaaccacaatgagataccatctcacaccagttagaatggcaatcattaaaaagtcaggaaacaacaggtgctggagaggatgtggagaaataggaacacttttacactgttggtgggactgtaaactagttcaaccattgtggaagtcagtgtggcgattcctcagggaccaagaactagaaataccatttgacccagccatcccattactgggtatatacccaaaggactataaatcatgctgctataaagacacatgcacacgtatgtttattgcggcactattcacaatagcaaagacttggaactaacccaaatgtccaacaatgatagacaggattaagaaaatgtggcacatatataccatggaatactatgcagccataaaaaatgatgagttcatgtcctttgtagggacatggatgaaattggaaatcatctttctcagcaaactatcgcaaggacaaaaaacaaaacaccgcatgttctcactcatagatgggaattgaacaatgaaaacacatggacacaggaaggggaacatcacactctggggactgttgtggggtggggggaggggggagggatagcattaggaaatataactaatgctaaatgacgagttaatgggtgcagcacaccagcatggcacatgtatacatatataactaacctgcacattgtgcatatgtaccctaaaacttaaagtataataataataataataataaaaagaaatttctaattgagttgcctaagcctgcccacctgtcattctcatatgcctaacacgatgtgagattttatatatacagtcctctgtatatatattcacaggttccccatccacagattcaaccacccatggattcaaaaagcaaagcaaacaaacaaaataacaacaacaaaaatacaaattttaaaacacagtataacagccatttacacagcagttatattgttttaggtattatacctaatttagagatgatttaaagtacatgggagagtactttaaaaaaaaagtacacaggcatgggggcagtggctcatgcctgtaatcccagcactttgggaggccgaggcaggtggatcacgtaaggttgggagttcaagaccagcctggccaacatggtgaaacccctgtctctactaaaagaagaaaaaacaaaaacaaaaacaaaaattattcaggtgtggtggcacatggctgtaatcccagctgctcgggaggctgaggcataagaatcacttaaaccagggagaggcagaatttgcagtgagttgagattgcatcacttcactctggcctggacgacagagcgagactccatctcaaaaacataaataaataaagtacagggaggatgtgtatagattatatgcaaatactgtgccattagggacttgaacatctccagattttgtatccacaggggtcctggaatcaatccccttgatggatacagagggaagactcactctcactctctcttgatatatatatatatatatatatatatatatatatatatatatatatatatatatatatatgcacacatacacacacacacacacacatatatatacacacacatacacacacacgtatgtatatttacatgtatttataaactgatattttattcaaatgtttcaactggcccctaggaagaaagatccactctgatgtgttctggctctgtgtgcccacccaaatctcatcttgaattatcatctgaattgtaatccctgtttgttgtgggagggacctctcgggaggtgattggattatggaacggtttccgcatgctgttcttgtggtagtgggtgagttctcacaagatctgatggtttcataagaggctcttcccccttcgctctgctcttcccttctttaagctgccatgcgaagaaggtctttgctttcccttcatcttctgccataattgtaagtttcctgaggccttcccagccatgcagaactgtgagtcaattatgcctttttcctttataaattactcagtctcaggtatatctttatagaagtgtgagaatggtttaatacactctgtaaaagcaaaataatcactcttcagaagcagaaaaaaactttttataagtgactcaaagtcaagatgacccatttctcatttatatgatataaacctatacatatcctctcacgtactttaaatcatctctagattagttataatacctaaaacaatgtaaatgctatgtaaatgcctgttatactatgttttaaaatttgtatattttgttgtattatttatatttttgttttttgaatctacggtttatatgaatatcattctctctccctctgcatctatctgtatctacatatgtatatttgtttttttcttagaacataacctagattcctctacagtgtaaatcccttgctttctggttttctgcctaataaaaggctctcatttctatcttggtctggaaatacccccacttccattttttatgaagtaaaaataccgaagatttttttttttttttgctagaagtagtttactgtctttctctacaactcattctaatatttttcttttcaactccctaccattcttattgtcttccagcaatgtctctatgatcatagagagacaaactgcagccacacttagccaggatcatttacatttacttgcatggctctgtgtagcttgctttttatgctaggcaggttcctgaatagtcagataggaattgaattcttggaaatcatgccattgtttaaggatgaggaagaacttactattttaatgaactttattataaaccttttttctaagcaaataatcaccccttactttatcttatctcctatgcaaatcctgattttcacatttaagctttacttaacagtgtcaatttgtatagttatctttaaacaatggtcagtccccactcttataattgaaaagtaagtaattttcatttactttctggcttctacctccagaaaatctcttacctctatctttattttggtaattctcttgtagggactttaatagcccctggaaaatcatcatagctctgcttcaatctgaaaacataactggcaggcatgagtctggaacacatacgagggaacgaagtacccagagccaagttaaatgaactgttgatgacttttctgaaaatcatagtaaaccatgatttcctcacaaaatatagaagtgtctgatttttggcatttaattctcaaacatactcagatacactttccttcttcctctcccactctgggttcatatcatcatataaatcagaaatgggtcatcttgcctttgagtcatttataaaaagtttttcttttctagctctgaagcgtgattattttgcttttagagaggatctttctttctggggccagttgaaacatctgaacaaaataaaaatcaattgaatatggatatgaaacttaacttgtctttttaccattaaatatatatttgaaaaatgtgctcttcttttatagcttttgtcacatcagcatgtaccaattccaaccagagaacgaaatattaatattctgccccaaagtgctgttttccagcctgtgccaaagcagataatgccagtaacagggagttttccaatctaactttcttataccagtcaaattatccatttcaaaaaagcatccagtcaaagtgctcccaataagtgaatattttgcctagagaattttgggcttgagttatccatccctctgaccaaaatctataagcccactcacccaggagatctgagaatgaaactaaatataaaaactggctttactactgggaacccgaaagttcagctagtgagggaaggaaaacaaagaatagaatgttttccgacaatccttgcttttgtgagtggtcagcagatgttttgtgcctctgctgtattccttagctaagggttcacatgaaatgtaccctctgaaggctgtggccttgttggaacgccaaattagtagttattcctcatgctctgaggtctagcttcaccttcagaaccaggtgagcttggtccccacaaagccctactggtacttaagcttcccatttcaagaggacatttgggttcactacacctctccaagccgtctgattaattgcagctgtgtgcaaattagttttcttcaggggctctctcctgctctcagattagcaacaacgtattcagatggaaagcaaataaagatagttgtaaaatgaggacacaaaagagatgcaacatgtttgctcttgatgggtgcattgatgtcagaacaactagggggaaataagaccaccttggtactgttatcatcgtcctgatgatggtcccgtcttgcagaaaagcccaaacagaagcagggcgttgtctaatcactgatgggtttcctgatattattgagaagaccaagcaaaattaatggtgatattatatctggtgaaattattataaattctccctgcagttttaattagctctgctctttttctcctcctgttttaatccaaagcatatgtgtatgtttgtatcagcaatttcaaaattctgtgaagcatttggtgtcatccatctagtttcaaaataggtacagcatgatgcagtgggaagaatgctagcctagaagttaggactcctgagttcctgcctaggtctgccgctaagctgtagtatgaccttggacatgacctttcaggaccttgatttcttcttatgtgagatgaaggattaaaatccaacagtttgttaaatcactctcaactttttagatactattaagtttaggatcccgtggagaggcctatcatccgagagaccatcctatcatcaaaaggtgaatatcaggtcaaagcaaaagaaaccacattaatttttttctgttgtcagctcacaaagctattttaagcctttggacaataagaaatatactttttttcccctccaataaatatacattatccattaaagtagagtgtgttgtgaactgaccttaagggaatttgctagtttttttgtttatttttgttttttacaggaaactaagtcctgtggaacaaaatagaattaccttcatggagcaagtttaacaaattgtcttcatttttggtcagcaggttgatttctaattccctcttattccctttatatgtatttttggcttcctgtctttgttttgcgttgctataaagaaacatgtgagactgagtaatttacaaagaaaagaggtttattagggctcatagttttgcagcctgtgcaagaagcatggcaccagcatctccttctggtgctgcccctaggaagctttcactcatggcagaaggggaaggagagctatgtgtagagatctcatggagagagagggagagcaagagagaggataggaggttcaggcagtttttaacaatcagatttcatgaaaataaaagaactcactcattacctcgaggaaggcaccaagccattcatgcgggatctgccccatgaccaaacacctcctactaggccctacctccaacattggggatcacatttcaacatgggatctggaggggacaaatatccaaactattaaattcctaaaggacataaaagggtgaactgcacaaggatactatatctccaaacaaatgcccagttaggtccaggacgtgttcaacagtgtccaaaatccaaagagaaccagagatagtgtggcttagtagaaggtaaactgattatacacactcagcattgcaagaaaccttaacgggactgttgtccaaccacacaagcattattcaaaaacctttttacctctcaaggtttggttttctagcatgggttgccaagctacaactgcccagagaagtcatttaaactgcaagagactcagctttctcatccttggaagagagaaattggacaaaattatctttaattttttgtttgccttaatatcctcttattctactaaacattttcagtattacagaaatcagctcttggaggaaaagacattgcagggggtgggagacaaagttggtgataccatgtaataagatttttttagatagtggcaagataaaatgttttgaggtttggcaaaaccatctagtagtttcagttctccctgacagtaagaagttaaggaggccaatttctctttcaagtcagaacttcttgttataactgggtagtaaacatactttttaataagaagtggctaaggcttaagaagaccaactgctgatacccagaaatagccaaagaatacttcattactgacagtgcacactttgatagacctgtcttttactattgacagtattctttctctgctgtttttacaagaaaaaaagcccaatgaaatgtaaaccttgttttcttcagttattggtcctaggagtattcagagtaaataaaaaaaaaataccttacgtatacttctataaaatcttttatttgagcaattaaaaaaagctatcttctttcagtcttatcaaggagagcaaattcctcctagaagtcttatttctacttctaatgacaattgctttattatgtgacattcaaaggaaaaacttgaagtcatatttctagtaaagtatttaatttcagaaataatttaaactgttacttcaaagcaaatatctgctattcctgacataaagtttttacccaagcttggtaataaagttatcataagaataatatggattattctcaggatggaatagaatgtcttgattaggaagaaacacacataagaaattcatttttttggaagaaagaaaatctgtgctgtttatctggcaatggaagtcagatcaaaatatatctatatgacatttgaatggggtcacgtgggaagacaagatctgtctgtatgaatatttttagcttctgaatttgacataagaataggatcaggaaaatgaattctgtgttacatgactaagatgcatattagaactcaggcaagatgattcctgtagttggtctactgggaaattaccctctgcctacagctttcaaatacatatatatactatgtgtgtgcatgtgtgtaaatttccaactgagtacatcagcacataaaatacacttgtccaaggtaaaaaagacaaacagttattaatagggcaaaaataaaatggggttatatccaaccatggcataatacttctcattagaaaaaagtgtggcgagctaattaagacccagtgatagttagaaagtctgagaacatttatctttaaaaatggagtggtaactaactaaaagaaggacccagaacctcctaatacaaatatcagttatattccctgagatttaaaaatataataattcttatttctaattcaaaggcctagagtgtaagtagggataacttaacctttttttttttttttaagcctctgtgagaaataacgcagctgtttggcccgtggtattctctttaaaggaaagaagttacaaagacaagaagaaaaaagtggaagagaaaaataaggagaaaaaatattcaaacagtacataactaaaaaaaaaatttttcacaaacagcaaggggaatcttgaaacaaaatagatttgttttaaaatgcaaagaaagagccttacccgggatgaattgctcagttctcttttgttggttgagttcacttccttccatttctgctaactttgaccagctgctaacaagcaaaagagcttcatagaggccatctacacgtgttctcttctgggttatcgcgatgctgacaaagtgcacctaccgcaaattagaagagcacaaagatttctgtgggtatgcctgcaaaactctggctgcgaggcatcacctcagctcagtagccttggatttacatgtgcctgcccccctgcccatggttactgagggtggcctgaggatggattcacttcataacccttttccataattatgtgaataacaaatgagctctatccaatagagaaaaagaacacattttaatactttgtgaagtgatcatgaggaaggggacagaggagttgagatggccaagagagatcccgccctctggagatgtaatagaacagtgacagataatgcaaaaaaagatttaatatatttttatatatttaatatttgtcttctgttgttgaccttagcttttgagtcaacagtaactaagaagcattttgtcatccgacggctcctcttcctttggccttctgtattgtattatctgataaggaagcagcgaacttaaagctcagttcaacgcaatgatccttcatcatagctgggtgtgaagaatgttgttccctcaaatatgacacaaattgtttggtcaatagagaagagaactgcattctatttttttccaaacatctgttatactccaaaacctttctccttaggccatggctgtctgaccaacagtaggtggatttctttgaaatcttatcttctgtagaactggatctcatcctggccaacatggtgaacccagtatctactaaaaatacaaaaattagctgggcgtggtggcaggcgcctgtagtctcagctactcgggaggctgaggcaggagaatggcgtgaacccgggaggcggagcttgccaagatggcaccactgcactccagcctggcaacaaagcgagactctgtctcaaaaaaaaaaaaaaaaaaaaaaaaatagatctcactagaagtattctcaattcagcagtagtgtccagttttgaatcaaataatttatattttgattatgtgtattaagaagctaaatctactcatatacaaaaggaaaatctttagcttttcatgtgttctggctaaaggccagaattaaaaggaagaggatgtcttatctatcagacatttttgtgcctttgaagccataaacttgagagaaacattagcttgttcctgaccctgcactcagcataagcatttgcttgtagcagtcactcttgggtgactataaattcacaaagtcaagaatttgcatcctgaattgatttgtgtaagatgtctaggggaatgctgattttatattggaaacaaggttagggggaagcctcaaaactgcctttatggagttctgtatctcagcatattataattcttacttctaccatactccagaggaatcagtctgggtgacttcataaaacagtattagaaaaattgctagcactacgaaatcaagcaggttatggcagtatattccttgtaagaaaattagtgcattaactctttccaataagtgattgaattagttttgcacataatctgatttatgaaatgctgcactcgcatgctcaagtagttagaaagtgtgtcgaagcagatgttgaactgaagaaagaaggttgcttgaaatgtaaaggtattataaaatggctaatctgtgggtatgacccaaagctttcagagatttcctggcttcactttttttttttcaatttaataaattttttttcttaaaaggtaaaattgccaatgagttaaatgttgatgctctgatgttagcaagactgagttcatatgtccatcgcttattaactccattttcttatcaatatgtttggcttctgtaagtcttattttcttgtttgtgaaaggaagatctaataatagaactggccttatagaattgttgtgaggattaaatgtggcaacccatggttattggtttcgtgcgatgcctgtcacaaagaaaaaacccaataagttgtagtggctatttttcatcttctcattatcaccattacttaagagagaggcaaagtgatagtatcatacaaacattttcatggagagttaaatgaacatctgttttttcttttcttcaattttttaaaaattatactttaagtcctgggggacatgtgcagaatatgcaggtttgttacataggtatacacgtgccatggtagtttgctgcactcaccaacctgtcatctacattaggtatttttcctaatgctatccctcccctagcctcccaccccctgacaggccctggtatgtgatgttcccccctccctgtgtccatgcgttctcattgttcaactcccacttatgagtgagaacatacggtgtttggttttctgttcctgtgttagtttgctgaaaatgatggtttccagcttcatccatgtccctgcaaaggatatgaactcatccttttttatggttgcatagtattccatggtgtatacgtgccacattttctttatccagtctatcactgattggcatttggattggttccaagtctttgctgttgtgaatagtgctgcaatagacatacatgtgcatgtgtctttatagcagaatgatttatacatacgtgtgcatgtgtctttatagtagaatgatttataatcctttgggtatacacccagtaatgggattgctggatcaattgtttttaaggacaggttgcataaaactgactaatgccattcatgacagtgagtttcaaaggcagatagctatcttagtccatttagggtgctctaacaaaatgccacaaagttaggtacattataaacaacagaaatgtatttgtcacggatctggaggctggggagtctgagatcaagaccctggcagatgtgatgtctggtgagagcttcttcctggttcatagatggcgacttccagttatgtccttacatggtggaaaggacaaggggtctttctgcgaccagtttttcaagagaattaatcccacttatgaggtctctgccatcatgacctaatcacttccccaaaactccacctcctgataccattacactggtgattagctttcaatatataaatttgggtggcggggtggggcacacacattcagatcatagcaatggcagctaggaggaagtaaattttgaatcctcatttccatgtaaagacttcatttgctttaaacaatttatttaacttttattgtgctttttctgaaaatgaaataacatttagctacacacagggagggtatgttgtttctaaagtaaaaattaactcttttgtaaatgtggcattgtttaataatagttcaccctgtccaatgatacttagcttttttatatatgtaaataaattattaggttactggtttttctttttcttttggtgggtggggggggtgttaagatcttattctcagtcctcaaaactctgttgaacagggaacatctgccctcattttcaaccttatttctttagtaccaattgcagccatgttataatctttgttttcatccaggtaaagctgagggaagggaaggagaatccactgagaaaaagattttccccaaagagtgactcagcctttgaaaagaaaatcagctatatgaaaagggaagagtatttaatcattcggagcaataattgcattgtaaatattagctcagctgataaggagtagagaaccaagagaatgagggagccgttacattgttttatcttgtttgatgcctttactcagtgctctagcatgggggccatgtctagggagggaatccactgcagctacatttaaggtcacctaataaaccgtgctgttttctttcttttcttctagactctattccttcattttttttttctgaactttaagcaaggaaactgccagtcatagagcatttccttatacacttccatgttactgttatgcagagaaatctgactggcaggctgatggccaggctgctctggaggaaagtaattagctatgtgactttatctaggccaaaaaaatgggataaaaaacatgcaaaaccattcacctatacagacctgttctcaaggcagtgtttaccctagtgcatctgctaattcctttcaagtctggaaaactgttttgtttgacatttttggaatgctgtgatctgaaccattagactatttttttctcctttaaggtactaatattctgatttttaaacaattaaatatgctctaaatttgtctcgcccacttctacatcttcttccaacatttacatagacatccatgcacattcatgcacaccacacaactacaagtcatttcagacaaatggtcttatctaattctttttagtgtttccattttattatttgtcaaattgaatggaacttccatgttttgccctgctgacatttaggcagacttgcataaaatacaagattatttctagctggataagaagctcagctatcagatagtgttgctgatttatacagtaggaggaaggagaaaagaccaatgggtgagtataataaatagaaacgtcctgaagcaattcacttgtagcctatccaaatcttgcaaactctgcataaaacatcctcccagttctctttcaatggaacaatttttcttttctttttctactcttcactgaacatttcctgtattctacatgcaacagtgcaccttttacattcgtttggcttatgtgctcttgcaataaccctttgctgtgtggtaatatctcatttgtgggaacttctgtgacactattaggggacagatacaatggctatgtgcctagcaatgccttcaccgtgctctatttaaatagattgctcatttatttgctactttgctcatcaccctgtctctcattcactataatatctttagcaaatcacatagtgccaggtaaataaatggtactcattcaatattgaccatatggatgaatctctgcttatgaaatatgagagccccgtgcagggtcattctgtccaggaactcatcttctctggcggtgtgagaccatatgtttaacatgaccagtaaggaagtagaaggaatcttccactactttttacattcttttttctttcaaaaagttttgtaaacttcaagtatgtaaaaaaacagttcttatatgttcatacagtttgctttcaacaataactccacacatgtgcattgacatgtaaagatgtttccagtataaagtagaaaaaaatgggttttaaacatcatatataaaattaatcaattttttaacatatagcatacctgtattcaggaacatgttctttggttattctcatttaaacagtcccctattgttgaatacttgatctgtttctattgtttcattttatatataatatatcctataccaaatatcctaatataacttctctgtgtgcttgtctaattattttgtttagataaaaggtttcatatggtgtccacttcatgccattatgtgatatgatttgcctctcagcctctaggaatgggtttttctctaaggatagtggctgccactctatctagtggctgaagtaatatggcttcatgtcatgtggctaacgattcatgccaaaggttgtccgcatcttatgtatcagtgagttatctgacacccctaatagacgcttatttcttttttcaaaaagcttgttcctgagctgaatttccatgatcagatggtggcaagagccaagtcttctcacataaagagaaatcacattgaatctgctacctacgaccactggccaaggggtcttgtcatcattgcattctggggaattggattcaatttaaaaagttgaagctgcttgctggcttccttcctggtagttttgaatgtgtaatctcacaaagatcttcttagctctggcaaagctgagcctgtctaaaacatttatgttagaatttacatgagttcatttgtgctggcgtcaaacatttcttgagtatttaccatgttattggctgatcttaaagccaagctacaaaggactagtaggggttagcaggcaggcaggaagaagaagggcatggttggcagagattgccacatgcacagaatatagtggtgaacctacatggtgcatttggaattgcaagtagtctggctttgctggaagtgggtttgcaagctgaggagtaacaagaaataaggccgaatagcataccaggaagtggtagatggcagagacccctggatcaccgtgatacttatgacactacttgctcacttgttttttggtttatttcctgataagctttgagccagaacattaatgcaaattcttgttcttgtgtaaaaattactgcaatgacttcccattgctcttggagaagacaaaatccttaatatggcctacaaggtccagtacaatctgtctcctgcctctgtagtcttattcttcactaggtctgccttcttcctcccagccctactggggcccattctctgggcttcaatattacagaccttactttaatttcactaatgggaaatgttgctgccttccaacaaagggcttttgcatgtgctgtttatatgaaatcctcttttcttcctgccactcttgcctattaatgttcttatttctcagcactcacgttatttttttactcagagaaatcttccctgagttccctgaccatgtcagatttttcacttatatgctgtcataacctcatgcatttctcttttacagtgctataaattgtcagtgacacatttgtgtaattaagtgatgaatgttcctttcttcctaataagtaacatcatctataccatcattattaaatcagccagcatcagctggggtacttatcatatgtcctatactgttctaaacacattatatgtattaattcacttaattctcataacagtccctattaaatggataacactgaggaataaaaaaagtaagtcacccaaagttacacagctgataggtgatgaagttagaattagaaatcaggggggaggagccaagatggctgaacaggaacagctctggtctacagctcccagcgggagcaacgcagaagatgggtgatttctgcatttccatctgaggtaccgagttcatctcactagggagtgcaagacagtgggcgcaggtcactgggtgcatgcaccgtgcgcgagccaaagcagggtgaggaattgcctcactcgggaagcgcaaggggtcagggagttccctttcctagtcaaagaaagtggtgacagacggcacctggaaaattgggtcactcccacctgaatactgtgcttttccgacgggcttaaaaaatggcgcaccaggagattatatccctcacctggctcggagggtcctacgcccacggagtctccctgattgctagcacagcagtctgagatcaaactgcaaggcagcagccagactgggggaggggcgcctgccattgcccaggcttgcttaggtaaacaaagcagccaggaagctccaactgggtggagcccaccacagctcaaggaggcctgcctgcctctgtaggctccacctctgggggcagggcacacacaaacaaaaagacagcagtaacctctgcagacttaagtatccctgtctgacagctttgaagagagcagtggttctcccagcacgcagctggagatctgagaacgggcagactgcctcctcaagtgggtccctgacccctgacccccgagcagcctaactgggaggcaccccccagcaggggcagactgacacctcacatggcagggtactccaacggacctgccgctgagggtcctgtctgttagatggaaaactaacaaacagaaaggacatccacaccaaaaacccatctgtacatcaccatcatcaaagaccaaaagtagataaaaccacaaagatggggaaaatacagagcagaaaaactggaaactcttaaaagcagagcgcctctcctcctccaaaggaatgcagttcctcaccagcaacggaacaaagctggacagagaatgactttgacgagctgagagaagaaagcttcagacaatcaaattactctgagctacgggaggacattcaaaccaaaggcaaagaagttgaaaactttgaaaaaaatttagaagaatgtataactagaataaccaatacagagaagtgcttaaaggagctgatggagctgaaaaccaaggctcgagaactacgtgaagaacgcagaagcctcaggagccgatgcgatcaactggaagaaagggtatcagcaatggaagatgaaatgaatgaaatgaagtgagaagggaagtttagagaaaaaagaataaaaggaaacgagcaaagcctccaagaaatatgggactatgtgaaaagaccaaatctacgtctgattggtgtacctgaaagtgaccgggagaatggaaccaagttggaaaacactctgcaggatattatccaggagaacttccccaatctagcaaggcaggccaacgttcagattcaggaaatacagagaacgccacaaagatactcctcgagaagagcaactccaagacacataattgtcagattcaccaaagttgaaatgaaggaaaaaatgttaagggcagccagagagaaaggtcgggttaccctcaaagggaagcccatcagactaacagcagatctctcagcagaaactctacaagccagaagagagtgggggccaatattcaacattcttaaagaaaagaactttcaacccagaatctcatatccagccaaactaagcttcataagtgaattagaaataaaatactttacagacaagcaaatgctgagagattttgtcaccaccaggcctgccctataagagctcctgaaggaagcgcttaacatggaaaggaacaaccgataccagccgctgcaaaatcatgccaaaaggtaaagaccatcgagactaggaagaaactgcatcaactaacgagcaaaataaccagctaacatcataacgacaggatcacattcacacataacaatattaactttaaatgtaaatggattaaattctccaattaaaagacacagactggcaaattggttaaagagtcaagacccatcagtgtgctgtattcaggaaacccatctcacatgcagagacacacataggctcaaaataaaaggatggaggaagatctaccaagcaaatggaaaacaaaaaaaggcaagggttgcaatcctagtctctgataaaagagactttaaaccaacaaagatcaaaagagacaaagaaggccattacataatggtaaagggatcaattcaacaagaagagctaactatcctaaatatatatgcacccaatacaggagcacccagattcataaagcaagtcctgagtgacctacaaagagacttagactcccacacattaataatgggagattttaacaccccactgttaacattagacagatcaatgagacagaaagtcaacaaggatacccaggaattgaactcagctctgcaccaagcggacctaatagacatctccagaactctccaccccaaatcaacagactatacatttttttcagcaccacaccacacctattccaaaattgaccacatacttggaagtaaagctctcctcagcaaatgtaaaagaacagaaattataacaaactatctctcagaccacagtgcaatcaaactagaactcaggattaagaatctcactcaaagccgctcaactacatggaaactgaacaacctgctcctgaatgactactgggtacataacgaaatgaaggcagaaataaagatgttctttgaaaccaacgagaacaaagacacaacatactagaatctctgggacacattcaaagcagtgtgtagagggaaatttatagcactaaatgcccacaagagaaagcaggaaagatccaaaattgacaccctaacatcacaattaaaagaactagaaaagcaagagcaaacacattcaaaagctaccagaaggcaagaaataactaaaatcagagcagaactgaaggaaatagagacacaaaaaacccttcaaaaaattaatgaatccaggagctggttttttgaaaggatcaacaaaattgatagaccactagcaagactaataaagagaaaaagagagaagaatcaaatagatgcaataaaaaatgataaagaagatatcaccaccgatcccacagaaatacaaactaccatcagagaatactacaaacacctctactcaaataaactagaaaatctagaagaaatggataaattccttgaaacatacactctcccaagactaaaccaggaagaaattgagtctctgaatagacgaataagaggagctgaaattgtggcaataatcaatagcttgccaaccaaaaagagtccaggaccagatggattcacagccgaattctaccagaggtacaaggaggaactggtaccattccttctgaaactattccaatcaatagaaaaagagggaatcctccctaactcattatatgaggacagcatcatcctgataccaaagccgggcagagacacaaccaaaaaagagaattttagaccagtatccttgatgaacattgatgcaagaatcctcagtaaaatactggcaaaccgactccagcagcacatcaaaaagcttatccaccatgatcaagtgggcttcatccctgggatgcaaggctggttcaatatacgcaaatcaatcaatgtaatccagcatataaacagaaccaaagacaaaaaccacatgattatctcaatagatgcagaaaaggcctttgacaaaattcaacagcccttcatgctaaaaactctcaataaattaggtattgatgggacgtatctcaaaataataagagctatctatgacaaacccacagccaatatcatactgaatgggcaaaaactggaagcattccctttgaaaactggcacaagacagggatgccctctctcaccactcctattcaacatagtgttggaagttctggccagggcaattaggcaggagaaggaaataaagggtattcaattaggaaaagaggaagtcaaattgtccctgtttgcagatgacatgattgtatatctagaaaaccccattgtctcagcccaaaatctccttcagctgataagcaacttcagcaaagtctcaggatacaaaatcaatgtacaaaaatcacaagcattcttatacaccaacaacagacaaacagagagccaaatcatgagtgaactcccagtcacaattgcttcaaagagaataaaatacctaggaatccaccttacaagggatgtgaaggacctcttcaaggagaactacaaaccactgctcaagggaataaaagaggatacaaacaaatggaagaacattccatgctcatgggtaggaagaatcaatatcatgaaaatggccatactgcccaaggtaatttacagattcaatgccatccccatcaagttaccaatgactttcttcacagaattggaaaaaactactttaaagttcatatggaaccaaaaaagagcccgcatcaccaagtcaatcctaagccaaaagaacaaagctggaggcatcacactacctgacttcaaactatactacaaggctacagtaagcaaaacagcatggtactggtaccaaaacagagatatagatcaatggaacagaacagagccctcagaaataatgccgcatatctacaactacctgatctttgacaaacctgagaaaaacaagtaatggggaaaggattccctatttaataaatggtgctgggaaaactggctagccatatgtagaaagctcaaactggatcccttccttacaccttatacaaaaatcaattcaatatggattagagtcttaaacgttagacctaaaaccataaaaaccctggaagaaaacctaggcattaccattcaggacataggcatgggcaaggacttcatgtctaaaacaccaaaagcaatggcaaccaaagccaaaattgacaaatgggatctaattaaactaaagagcttctgcacagcagaagaaactaccatcagagtgaacaggcaacctacaaaatgggagaaaattttcacaacctacttatctgacaaagggctaatatccagaatctacaatgaactcaaacaaatttacaagaaaaaaacatacaaccccatcaaaaagtgggcaaaggatatgaacagacacttctcaaaagaagacatttatgcagccaaaaaacacatgaaaaaatgctcaccatcactggccatcagagaaatgcaaatcaaaaccacaatgagataccatctcataccagttagaatggcaatcattaaaaagtcaggaaacaacaggtgctggagaagatgtggagaaataggaacacttttacactgttggtgggactgtaaactagttcaaccattgtggaagtcagtgtggcgattcctcagggatcaagaactagaaataccatttgacccagccatcccattactgggtatatacccaaaggactataaatcatgctgctataaagacacatgcacacgtatgtttattgcggcattattcacaacagcaaagacttggaaccaacccaaatgtccaccaatgatcgaccagattaagaaaatgtggcacatatacaccatggaatactatgcagccataaaaaaggatgagttcatgtcctttgtaggcacatggatgaaattggaaatcatcattctcagtaaactatcgcaagaacaaacaaccaaacaccgcatattctcactcataggtgggaattgaacaatgagaacacatggacacaggaaggggaacatcacactctggggactgttttggggtggggggaggggggagggatagcattgggatatatacctaatgctagacgatgagttagtgggcacagcacaccagcatggcacatgtatacatacgtaactaacctgcacaatgtgcacatgtaccctaaaacttagagtataataatgataaataaaataaaaataaataaaaataaaaaataaaaataaaaatacaaaaaaaaaaaaagaaatcaggcagactggatctggaatctgttctcttaacctctctctctgctcaccggtaggttatagacctaacataaagtagttgctcaataaatatttgttgaaagtataaatgaataaactaattaataaatactttatatgtgtcccactcttaactggggaaaattgggtgggtagatacaaaagaaccctagtagactgttcgctggcaggaatgtgttctagaggattggggaaagagaaacccccgaataactgtacgtgatttatgatgaaaatctttcaagtagtggaaagttataaaatgctaaccaaaagattagttatttggtttatatgttgatcactgtgatctttcccaatattgactggggtttgttgagtgtctgtaatcccacaggtggatgttcatgatctgaagtgacaatggtatatttgctcagcatttcctgtacctgaaacaacccttgaaaactgaaatagaaagagcaagtcaatggtaatatcatccagcactctgccaggcttatggcgaccttgcttacccgaaagcaaattacttccctctcatttctatataataagtactttacggctttgtgttttcatgcattgagatttccctaggagtctgagaagatgtccaggaataaaagagggaagaacaatgattaaactatttctaggactttagacattggattatattcagaaacccataatcagaccgttaatgaatgtcttcgcattcattatcagactctgaaaaagcatatccagtctctccatggactggccttcacatatgctttgctatctggtagaaatatctgcccaaaagattattttttatggaaataatagtgcacatgcagattctagatattattttctatttatcaactgcattcaggcagtgctaagtagatgactgatgctgaaattttactagatgatctttgctctctattttgttatatgacacatggggcaaatacgtgagatgagcaattagtgaaattctggaagggacagatttatgtcatactattgaaagggacaggaagtggattaagtatgatatatatatagtatgtgtgtgtgtgtaggtgtgtgtgtgtacgtataacaagttagtttccttttcctaccactgaaattgttaaatggaatggtgacgtagacactttacttctctactcctggacttactagtaaagaagaaatatataaaagagcaagatagtattgatctggggtggtactatggtatgtattaataccataccgtaattctatgatctattaatgtcacaaccagctacatttagctggcttttatatacgaatgtgcatagtactgttttgtattaaatatcaccagaagatatttgtcacataaaaacagtgagattaatgtttatatattttggcactcatgctagagttgaatgaggttctgtctgtggggataattctaggtatcctggaaaacctccacatatacaccaaacccagaatcaattcagataggcattactgttcgcagtcatctaatttcaagttagggtagtaggatatggattggggggcgtgattcttagtgccagagaaagattaaattattcatagggaaagatattcagcctaagatggataagactgaaatcaggtgcctggactctagaggattgggctctaaccgaaaaaaaaaaaaaaaaaaaaggagaatccagtaggaattcattgagtaagccaaggttacaatctgctggacttcagaggtagagttctagatgcccattttaccaccctaggtcagaagtggggagcagagagacagaaggctataagtgaggagacagtactgagacactaagtagacattctagccaactctgtagaggattctcatgttatgagctgaagtagaaaggctatgtttgaagattctgtctgattttgggcatcttggttctagatctatcataggtgcagattaaattgtttccaggctgtacttgatagttggtaaggatcaaacaataccctcacataacttgtcctagaactggttgtgctatggcatcattgtagtcccacatcctagcatggagcctaaaaaaaagtaggttcttcataaatagccaaggaatgaattaatgagtgatgggatgagtgtgagtggagaaataagcaaaattcctagaaatatggggtgggagtatggcagacaaacgttggcatcatccttcaaggaccagatcaaaatgccacatttccactacagctttctctgagttaattacttctctccactgttactatggtgatgtatttattctgctttaatagcatttatcaatcattttgtggttatattttatgatttctctcttcctcctagactatgaaatccttgactgtagaattgttggtttgtacctacattactgcagatagtatctggcaagggctgggctctcaataaatattgaccaaattgaggctgtaaagattccaatggaccaatatggcttgtgacccatgcttcatttacctaaatgaggccacaaggctctgtgatcacgtggcagtcaaataacaaaactctccaaaatcaggatttcttcttccattccttcaggttccctcccccatgggcatggttatctcatcctttacctcctggaaattatatattggaggttgtcagtgtgtgctgttctgtattgccctatagttaatgcacttctctgacgtagaggactgagctctctatagaactatgcagtgtcaaggaccctctgccttgacatagatgcttggaccacactgttaggtaactgagaagacaaagaatgtggctagaggctaaaagggacagagcaggaaaagcatgaagggcatgaaggaaggagcttgaatttttttcccaatgtactggggagcccaggagtggcatcactttgtactccagcagtgacattttaatttacaagccaagaatgcactgatcgccaactgcaaaaattgatttggttgttcatctgattcaacccatgtcagagtttgaaagtaattatgatagtggggctgataggcaggcaattacatttttgttctcttgctttctggctccttctccctctctttcccttcccacacctccacctgcaaggttgttcttgtcaggaaggcaatgtaagcaggagacgagagagtaatctttggagatgtggtatatggactcttgtggcagaggctataataaataatagtatggctggttctttatcctaatttttgttagcctcttatgaactctaaccagataaaagatgcaaactattttgtctccttctttaaagtacaaaatagaaaaagcacatgtactgtaaggcagtttctgtttctgatttaaatttgagttgtctttgcaacatctatagattcggtgtctttctaaaaaggtttgctccaaatcataatacaaaaggaacctgggatagggagagatttaggcaaagctaaaatccatctgagttggggagcagattccatgggagactgaaaatgtgtttcaaactgtagtgcaagaaattgaacaaagtattggaatttttctaaaaaaaaaaaaaggttcctttgctgaaagtagtacctggcatgtaaacctaaagtaatatagaagatgaagtggaaaagtatatcacaaggcaaaaattactttttagactgatgaagagatggatggatggatgtgaattttttttatctatttcttattttgaaggttatttatttattcacaaacactggaaaattcagtgtttttcactgagcaaaatagcttgtctggtccaaagccagtaaaataagaattttgtgggtggggtatctactccattagtatagcaaatgttgagatatataaattattttaatatatttattttattgacaatataaaaaaaaatttaacaggctccacaccaaggtcaatagaattcagaagcacatctgtcctcccaggaaacttgtggtttaactatttactatagctacctcaagattttacagaaaaaaaaaaaaatgagaccttctcttgaaaactaccatatcccagatctaggcttttctatgcactgtaacttctctataaacctcctttctactgactgccccacttcaatttggcacatacaccctttaaccagtaagcatgtgcatgtagtcagtgtgtcagacaggtttggctgaattgatataagactggtagcataggctgggcgtggtggctcacgcctgtaatcccaacactttgggaggccgaggcaggtggatcacgaggtcaggagtttgagaccagcccggccagcatggtgaaaccctgtctctactaaaaatacaaaaaattcactgggcatggtggtgcgcgcctgtaatcccaactactcaggaggctgaggcaggagaatcacttgaacccaggaggcggaggttgcagtgagctgagatcatgccactgcactccagcctgggcaatagagtgagactctgtctcaaaacaaaaaaacaaaacaaaacaaaacaaaaaaagatgagcagcatggaacatgatgttggcatgaggccctactacccggcagcagactatcagggaataaactagataaacctggaaaatgttttaacttcagtttattttattcacattaagtaatggagtagcatgttgtttgtttgtttgtttgttttacctctaaacctcctgtatagcccccttttaaaagaagggcaggggaagaggcttaaaatatggtagtattgactcccaggcctgttcagtctatacgaattttcaggctgtatagtttaaaaaaaacattgttcaatttcttatacgtttttactagtgatattactttagaaatgggcctcgaaagactcaggttacttttagatttgttcagggtttaaagcttcttttaggcacttcttgggcttcttctacctttcactgtaatatagtggtgaagagaaagactttggaatctgatagatttgggtcagaattgtagttttgccactcattacctttgggtaaccaagctctgtgaacctcagtctcttctgcaaaacagaaatggtgacatatttcctaagtctcttggcaggattaaatggaatacagtgcacaaaatactcagcacagtgcttggcacatagtaaatgccgaattaatggcaatgaattgttgttgttgttgttttctttttgagacagagttttgcttttgttgcccaggctagagtgcaatggctcaatcttggctcaccgcaacctctacctcctgggttcaagtgattctcctgcctcagcctctcgagtagctgggattacaaacatgggccacccatgcccggcttttttgtatttttagtagagacagggtttctccatgttggtcaggctggtctcgaactcccgacctcaggtgatccgcccacctcggcctcccaaagtgctgggattacaggcgtgagccaccatgcccggccaatcaattgttattgatttattactgagattgctttaaataaattcatccttatttctgttgtagtctttaccttgtctccagatctttggaagtctcaggttcatttgtctggactttgggggttttgtttaaaactgcctagtctctgcagccacatcctccaccactgtagcacatgatcaaaaaacttttctctgaggatactgagtatttcttagacctatgtcactagctccctgggaactctctctacccccatcccatcaactctctgaccacaagttttcaaggaatcttcctcattatactcatctatcattcttgcagttttctgtctcatcttgagctgttggtcaagagtagaccagagtatccatttctcaactcatttcttaataaggcaacaccatgttcaatgggcattcattgggccagttgaggctcctctgtaattttattttattttttgagacagagtcttgctctgttgtccaggctggagtgcagtggtgcaatctcagcttacagcaacttccgcctcctaggctcaagcaattctcctgcctcagcctcccaaagttctgggattacatgtgtgagccaccacgcccacccttctctataatttaaatgttatctctctttataacattttcataagaggatccacaattctattttcccattcacttataaagaacaaaaatatatccctaaggttccacaagtacctctggcctttggggaaaaaaaaaaaattcacagatgcttttttgaggaggtaattatttgtttgttgtgtccttgctattcattttgagatagatactcaagctctacacctcttagcttatataccagtttcaaatttatgtctttattatttattataaaatcttttaccagctgggcatggtggctcatgcctgtaatcccagcactttgagaggccgaggcaggcagatcacaaggtcaggagatcgagaccatcctggctaacacagtgaaacccggtctctactaaaaatacaaaaaaaaaacaaaattagccaggcgtggtggtgggtgcctgtaatcccagctacttaggaggctgaggcaggagaatggtgtgaacccgggaggcggagcttgcagtgagtcgagactgcgccactgcactccagcctgggcgacagagcgagactctgtccctaaataaataaataaataatctttaccttgaatattgagatgggttcaatacaatctcaatttagaatacttaaaagatgaaaagttccataaaataaattttctaatcaacagaaaacattttgttaagatgttgctgatgcaaataattctagcatgtatcactgttagttttctatctttgaaaactatcattcaactaccatcgtagttactagacttccattcaggatcttgcatgcctaagagtcatttcactgccaaaaatgaggaaatatagaaaactgagctgtgtttttatcatctaccatttcaaaaaaccctgtggaaaaaatatttcttttagcaaatctcagacattatcttgacttatatgtaagatgtacctctctctttaaatccaagtgcattgaaacttctggctcataaggtaatttttttttttaaataattaactaaacccttaaaactacatagaagtctactttgttttataaattaaccccattattttaggaattaatatagctttgtcttgtgagatgctgaagttatttttcctggttcttaatattcagtctttccgcttatctatttaattcctgatcactagccaaactatatactacagtttggttcatccaatttaaatagctggcctgtaactaagaaaagaaaaatatattttgtgaagaataggtatgaggtagagaaattagtggtagtatgatacgggaaaagagtaatgtcaaaatgcatggtaatttatgtgatatgccgaggactgcaagaagtcaagaaagaaacataacaagctaacagctgtcaccaacaaatagcaattaatttcagcattcattcccttgctcatgcttcatgaaagtatataggtaaacaggattcgtatcatgttctattttcttctctgggcctcaggcttccagccctctgagctactgtcttataacattctgaggatgtaagaaagaacttgatcctgttttctttttcagtctggagcagagacacggtgaagttcagtaaggtctgacacccattagcattttgtgtgactcaggatacgaatcaaacctactgttgtggaagcagctttccatataaatctaattcccaccaactcctgccaccaccaaagctaatagtcaagtgcttgtattgctgatagcaaaggtccaagattattcttattgttttactggggctacttatcaaaatctatttacttgtctattctatggatggggaggtggtaaagaaaaggcttaagtgtcctacagagattcattctatgctgcctcaaatgctttgaagcagtacaatttctcttttaactgcctcgatgtaggtgaagagtcttgcaggatatgttcactgctgaagagcaagcctgcctcattcataaccactagtagctgacaacctttggattctttccacagcttgaaaattcctccattccttgaaagcaccctgcactaatgctcgaagtattaagtgtgtttttatttcctagaaggatgcattttacacaagtcacttaaaagcttctggaagctttaattacaggttgactaatatttagaagaattgaaatacccctctctctcctctgtggtatgcatgagccagattctggttcattaaccagaagtctattacttttcccctatagtttcatggagtaaaatggtagatgcaaaccaagagaggtcaagggacctgagcttggttctgtctttgtcacaactaagagtctgaccttggatgagtcatggtaagactctgtgtcatatataaagagtattctgagagtaaaacacgcatacaaatgaaaagtatggttattatggtctcttgaatattcttagatcaatttcacccattggatggggctagtatatggttgatggatggtatttgtttcatttatctggcatgcatttaaatcttcaggtgcattaaacgaacaacacaaatttggtatatgattttcatgctctcttgcatgatagatataaaatcttaatcagtgattgtctggaaaccacagtctccaaaatgctgcctaggagtgctaaagagctgtcagatctaacttatatgagttgacaacatagagaagagaaagaagttgaattcagttaaacctggaaggagaaacccatagggtggaattatctgaatttgaatttttctgagttttattcccccctacattatgacacactaataagtggtctaccttgacccagagatacgaattttggcctcatttgtagaatagcacctggattcaggaataactccttgaagtgtcccccttaaatctctatgtggcattcaatgttcacttactcatagaccaaggagataaggacatttatcttctcaggtaaggtccctctgttgaacactgaaacaaaggggttacattaccactgcctatctttcagaaaaatgactgctgtgatagcataaatgtcccgagagctttgctttgatagaagtgtgtttttaatgatatgattttggtgtctggccctctgtggatagcttggcatgtgtcttgttctatttaaacagcactgactgataaagtggacgttaattggcagttagtgacgaggctgcaggtctttgttacccagcctttcagctaactgatcattaactaggaggaaatgtgtgacccagaaggtcattactgttattacgtgggaaaatacatttaaatgttacagattgcttttttatgaatcaggtgagcatttttagaaaagagagagcttgatttacaatggagtctgttttcagtcctgctcttttcctgtccctttgaagactaaacggtatatttctagattcccattgctgtattgcctagaacctcacaatgttgatattgactaaaaaacagaaatttcttcaactccattaagagcttttccaaaatcttaaaatttccaaataaaatcctttcgtctggatgccactcactttaacaagctttgagtaactttttttaatgaaaatgtgatagaaagtaatgtaactgcatatgttttattatgtaaaattctgatagtatcatgtatgtctttagaatttccgttgtcacacattgtctgtgctttgtaggattttgcagattaagccttagcactcattttgtgaggacagtgaatcctaattcctcttcttcattctttctgtgacctttttgattttgcctctttagtaatctcctcactgcccttgtaatgcaaaaaataagaataaaaatggtctgtttgggtgctgtgagtcttggcaattaaaacttcacatgaaatttgtctcctgagagaaaatattattctcccttttaataaaaggatacaattaaatactccctgaaacctctctccttcaaatatattgtcttatgtaaaagatggaaatggagccttgtttagctgaaaaactgaagagccaaaaacatttctaactataaattagtttatgcatattaaatatcccagccttagctctaataaaaacaaaaaaaatgtgaagcatggtgtgctctgtggttattaacctgttgttgaaaccctgacttcagttctaggcccttagcatgattacttctttccttctttgggttgcatgatgcttcaaggtctagaaatgccaatgtctttcccaaggggttttaccttttacctctgaagattgaagaaagcaactgagttgttcagaaatctctttaaattagatttaaaaggtactgggtttatttttgcatgtcttctttattttttcctccaaagattaagattgtattttagaaggctcttttggctcctttaaaaagaaagtttatccttgtatcatataggactgaaggagataggctgcagtttgaaggcaagagcatctgatctccaaagaatcagaaaatctcttcttttgttgcatttgtaggtactttttgttgtgttgcttttttttttttttttttttttttaatacaggtaaagttcaaacgagcacagcatggtccaaatggtgtttaaagctgtctaagtttcctttatgtaactttcacttcaacaagtatgttccagctgggagtctatcgggctgttaaaattaactttattcttcttttgttattctcatgcacacacacatacacacatgcctacatgcacatgtgcacacagacacacaggtgtgaacatgaccatttaatcacatccagcagggctgaatgtcactctgcggggctttattgactgttgtacaggctaaacatttcattcagttgcaagacagaaaaactctgcaggatgaatttcaaaacagagagcagaattgttacccacagataagaattctttgtaaggctttcaccttctcataaaagtgttagttaagaagaggtgaaaacaggtattccattcatctctgaagtgtatgcagtaatggcctcattcggctgagatttcccagcagcaaaaaatgtgcttggcagaacagttgctctaaatacctgggacatacattctttctaggattaaacaaataatacttgctgccctttgtataaaaagatcacttttctggtgcaccattagtgtacatttgatttgatttgtttgttaagcagcaaaggtgggtttccctggagccacttacacctcctctcggtcctctttgcctctggctgtatatgcatgttcattctaccacctgatgacttcatgcttactctgtgttctaactaaatcgaatgagtctcttattcccattccttcctttttactttcctgcctctaggcattaatttgtgccatttacctggactatctgctcccacctttgactattaatatcctatttattattctatcaaagccaaagaccatcatccccatgaattcctctgacatcccactcagaatctatctctctttcctcagagcacagttttttttctttttactatcatttaaggacagttaggccaaacacttacctacttaattataagcttcttgaggatttgggccacttcatatggcttttggttttccccaaagcattagctccaaaaagaaaggttgaatgaatgattggtgagtcatcaaccttggcatagttgggactaccctttgagaccactaaccagaatttttctcaatgaaatgaaatttattccccgacaaattgactgcaccatgttagtctccttaacatcatctgctgaaccatctcttaagaaacactttgatactagatggtaaataaccactgtgtcaagacctccaagtgccctttacctccaggtcacctgtgttcctgcagcaagacacacctctgtccccaccatgaggcagaatgaggcttgggacagataagacttccagaacccagctccagcactgtggccactgtctgattaatcagttcttcttctgcactgataattaaatactcactgttaaattttatattacccttgctagtatcattgttataaccaatgtgacagccacaaaagagaattaaagctatagactgtttatggactgtcttcacttcagcacagcagggaagaaaccagggatctgaataagtactagggatccttgctcattttcccaatttggctacaaaagttaatgaaattggggccaacgcttaaaatgcagatattgttatggatacattttatgatataaatagagatacacttgtttcatggaggggtaactagggacttagatttcatttggacctatgtgtgccgagcaattggaagcatattaaaactgttttatgtgtaagcatttattgcttttgcctataagatgttgcttatgtgggaaattaagagtccagtccaatgtattcctgggtatacagcttatgaaggcatttaaaacctaaagcatatttattctgcatttaaaagtgtttagagactgccttgtgtgttaatgtgtgctgtgcgactagcactatttaaatcctatccccctgcatgcattaatgtgtgcgtcgaagggaagaagagcaagggatgataaactctgttaactgcccaatgttcaactaagatttatgtaagaaagaacagtctagtgcattaatgtgaatattctaagatagatgtttatcttaatggactcagaggtacttacaaacagcataattgctgaagtcattttacagggcatttattcagagtgattacactactcttacttttctttacataaagaattccacttaagggtttaagtgagacaggctagtgtggccaaagaatcataggttcctcctatctgctgctcagcgctaaggctatttgaaaggaggagaagcaaaaccccaaatctccattttggcactttgcaagaaattggtccaaatgttcaatcactccagttttcagatctacatgatatttgacttactttaaacctatagtcctgcaaataagaaatttatctctctggtacatggttgtagaattcaaacattagttgtttatggacttttatggaccactgaggcattttctgtcttgaaagcaaatgtactcttccagagaaactcctgttctttttttaaagttttatttttaactgacaaattaataattgtatatataggtacgacgtgatgtttcaatgtctatattcattgtggaatgatcaacccaggataattaacatactcatcacctcaaattctttgtagcaagaacatttacaatttattcttttacatgaatgaattttaaaatatataattttgaaataggcaattcattattaactctagtcaccatgctgtgtaatagatcagaatctacttctcctgtctgaaactttgtagtcttcaaccaacatctcctcattccccattgacctttcctttctcagcctctgataaccaccactctactctctatttctgtgagtttgactttttagatttctacatacaggtgagatcatacgggatttgtctctctgtgcctggcttatttcacttagcataatgtcctttagctccatccacattgttccaagtagcagaatttcctgctttttaaaggctgaatattattccattgtgtgtgtgtatatatatatcacatttaaaaaattttattcatccattaatggaaaaccttcattcttgaaaaaatagcttataaagctatttatgtccctgatacctccaaagatcagaatgagtaataatctcacaaggatgggaaatacttcctctcttccaccttttgcatgtccatcctttgaacatgactcctggtgtgttagtctagtctgttctcatgctgctaataaagacatacctgagactggctaatttataaaggaaagaggtttaatggacttcacagctccacatgactgggggggcctcacaatcatggtggaagacagaagaagagcaaaggcacatcttacatggtggcaggcaagggagcatgttcaggggaactcccctttataaaaccatccgatctcatgaaacttattcactaccacaagaacagcatgggaaaaacccacccccatgattcaattacttcccaccgggttccctcccatgacacgtggggattatcgcaattcaaggtgagatttgggcaggacacagagccaaaccatatcacccgtcttacccaattctgttgaaataaacagacatttcctgagtacctgctatccattcaagttttttctatgagctaggctctggtccaggagtatagtaaccctacgggtgatttcagaccaataataagtaacactattaagaacacatcacagaagagtaacatctctgactcgctgatatccatttcaaaccacataacaatagcatgaagtagatgtcactgactcaaattaacagaagagaaaactagggtgcagtgtttgtgattaccttggactctcaccataatagactgagctcatgttttctgactcaaaacacaaaacttttcccttgatatagttgcctctagaagaagtcccttgtctccctcaaatagcaatcaagtagaagggaaaatagtgtaagtcaatatatattaagtactttcagtgtgattccaagaaactattgagttgcgatgctaaagggagcattttatttttcagccttgggatcagaaaaacattacataaagaagtgtttgggttggaccttaaaaaaaggtataccatttcagcaggtataaatggaatgaaatgcaaatagagttgggtaaggagcagtataagccaaaacataaagttatgaacttaatacccttgttcagagaattgaaaacatttaatagtcagtatgtggaggcatttatagggacaaatggtaatggaagatgatactacaaaattacactggagtccagaggtggaggatcttgaattttaattttttttaagtctagacttttgatagtgagataaatttgaaccaacagagtgaaacatgaaaactatatttttatcctggaagtactttctagagttcattaacaggaggaggtaagggtagacagggagtctgggtagggaattttaggattcatccacataagcaaccagggaagtaggaatgaaaactggagtaacattttagagatggctttgcaggacttggtgcctggaggtgtgacggggagcaggaaggatttgttacaggaaagaggtcccgacttagaccccaagagagggttcttggatctcacgcaagaaagaattcagggtgagttcacagggtacagtgaaagcaagtttcttaagaaagtaaaggaataaaagattggctacttcatagacagagcatccccaagggctgctagttgctcatttgtatggttcttgatgatatgctaaacaaggggtggattactcatgcctcccctttttagaccttatagggtaactactcttgtcccttgatgatatgctaaacaggccatggcatttgtgaactgttatgtcgctaatgagagtgtagcagtgaggatgaccagaggtcactctcatcgccatcttggttttgatagattttggctagcttctttactgcaacccgctttatcagcagggtctttatgacctgcatcttgtgctgacctcctatctcatcctgtgactcagaataccttaactatctgggaatgcagcccagtaggtctcagcctcattttacccagctcctattcaagatggagttgctctggttcaagcacctctgacagatttaaagatgaccctgagagtttgggcttgttcctagagagtaaggacaccatagacagaggccaggaaggcagcagagggaggagttaatcaattcagtctgggatatgctgactgctcatgtttccaagatatttaatcaaaaatattgtcccttatgtgttagtctatgttctattactataaaataaacttctgagactaaataatttatagagaaaagaggtttatttggctcacagtctgtaggctgtacaagcagtgccagcatctgcttggcttctggtaaggcctcaagaagctttcactcatggtgaatggcaaacagggagcaggcatgtcacatggtgagagagggagagagggagcaagggagacaggaggaggaggcgccacccttttttttattatttaattttttgagagggtggcacgatcatggctcactggagcctcaacctcccatgctcgagcaatcctgctgccttagcttcctgagtggctgggactacgggcctgcaccaccacacctaatgtttaatttttttttaattttttgttgagatgggatttcattattttccccaggctggtctcaaacttctgagttcaagtaatcctccctccttcatccccaaaagttctgtaattacaggcgtgggccactgtgtctggcccaggctctttttttttttttttttttttttgagacagagtctcgctctgtcacctaggctagagtgcagtggtgtgatctcagctcactgcaacctccgcctcccaggttcaagcgattctcctgcctcagccacccgagtatctgggattatagatgcatgccaccacacctggctaatttttgtgtttttagtagaggcagggtttcaccatcttggccaggtgggtcttgaactcctgacctcatgatccacccgccttggcctcccgatcttgtgatccacccgccttgacctcccaaagtgctgggattacaggcatgagccacctcacccggtccagctcagactcttttaaacaaccagatctcatgtgaactcattactatggggagggcaccaagccattcatgagggatccacccctctgagccaaacacctcccaccagccccacctccaacattagggattatatttcaatatgagatttggaggggacacacatccaagctgtggtgggcattgtaatcacggtggagctttcctcatcaggctgatacccaagtcccacccctgggtattgctagaatgtcacctggtgactaatgagtgccaaaggaggagaccaatcccgtggcgcccttgcatcctctctgcttgtggttgctctctctgtattgttctctctgttatgattggctctaacttccattaagagaaaacttgacctgcagtgactgaagacaggatacattttcttaaacaagaattccgaagtttagagaacataaaactgcttaatttggctcctataataggagccaaatttttattttataataaataattataataataattatatattgtaataattataattaattatatattgtaattataattaattatatattataataattataattaattatatataataaattattttattctaatttattttataattgtcaagtttaatatttgacaatatctgagtcagcttcccagttcttttcttggctttccccccaacttgccaccttatgggcacaagctgattgctgcagctccacatgtcccgtgcaaacccaaggaagaagggaaagcagtcagaccagccaagtctttttcgttttatcaagaatagaacaagcatttctagagcctctagaggatttccttgtttagctctttgtccagagctaccacatggccacttttagttgcaaaggaggcttggttaggccggtcacattgccagctctcgcaaggaggaagaggggaatggatattgacaatgtctgcaatagtcatcttccctgctacgctgaaagcactttaaaggcaaggaccaagctccgtcaggccatacttatgtccgtgctatgccacacttctcacctggcactttgctggacatatgaagacctgagatgagaagggtttgaggagacacttcctgcccactgtgctaagcactttcttgtgtcttttgggttctctgagcagctgtaggagtatagaagcctccagatatacgttaaactctttttcagcacctctcaaaacagaaaaaaaaagcaagaaaaagactacaagctgggaggaaatctatgctgctgtaaaaatagaatagggctggagtgcattcttcagtaatgaatgcatgaaaagcagcctcttcaattataaatgtggcttctcttgtttgttgcccagtaattctgttttattgatttctgtttacttccaatcacctcaaatgagactgtgttgcttagagatcttgatccctaaaagtttgtcattaaagctactctgctgtatttagttattttttgctcaaagcatttgaatcaatatgtatacaaacgaaacactttttcctttgctccctagaagactacaagaaaaaagaatctagaaaaactaaataaagatgcttagatttttttaaaaaaagtcccagcaaatgacatattgatttctttcaaagaggcagagtgtaaattaaaaatatttttctgacacagtttttaaagatgccactgactcagcagagtttgtgcttattgactttctcttcctagagggccagggtggaaaggccgcccacttttcctaagatcagctggctttcaaaatcctttgagggaagttagccttaaagccaatgcgagcaaaggttcttgattccctgtgatcaggtctgagttccggttttgtcatctaccacatcacttctgtgtataaaaaggtgttgtaatttttttttccagaaaattatatggtcatcattctttttcaaagtggttgcattaaaacccagaattctcagaggtggaaataaacaaaagctgcgcccttattagagaatactctctggaatgttattaaatgggtctgggcagatagagaggggagttagagtgggagcatgtgcattaaaagagccacaccaatacaggaatactagtgctgtttcctcctggtacctttgagagaataaagctagtttagacccacagtcggccgggcgcggtggctcaagcctgtaatcccagcactttgggaggccgaggcgggcggatcacgaggtcaggagatcgagaccatcctggctaacccggtgaaacaccatctctactaaaaatacaaaaaaaaatcagccgggcgccccagctattcgggagcctgaggcaggagaatggcgtgaacccgggaggcggagcttgcagtgagccgagatcaagccactgctctccagcctgggcgacagagcgagactccgtctcaaaaaaacaaaaacaaaaacaaaaacaaagacccacagtcatgaggctaggagggaagcacgagggacctggtttcaggaacataatctatttgtcataatttgagtttctgaaaccatgtcacactcctttggcctgttcaaaatcatttttcagaactgttctcagggttagctatataatttgtggaaaccaatgcaaaataaaactaagggcccccttgcccaaaaatccagaaaaaaaagtgttaaaagtgctagaatagaatttcttttctctttcttcaatagtctatttgttatgttttttatttgctattgaatgacatttaagtaaataaaaatgtaaattagcatgaatattaccattcgtccttatattgtgtgcaatgccagttttaaatccagatataagagcattcagctcaaatgcagaatcattgaaataacacaatttgtatgtcatagcccatatatgcatgtgtcttttgttcttattggaagagtggaaatgccatccaaaagtaacttactgctttttgtttcacttcttgatgcatgcacattctaccaacgctttttaacttcagcctaccgatgcatcaggtagaaccaaaaacaagaggtctcttgccctgtgcaagccaagcctttctgattagcaatcctagagagaacaggtggctcacgcctgtaatcccagcactttgggaggatgaggcaggtgaattacgaggtcaggagtttgagaccagcctagccaacatggtgaaaccccgtctctacaaaaaatacaaaaaattagcagggcgtggtggcaggcacctgtaatcccagctacttgggaggctgaggcagaagaattgcttgaacctgggaggcggaggttgcagtgagccaagatggtaccgctgcactccagcctgggcgacagagtgagactctgtctcaaaaacaaaaacaaacaaacaaacaaaaaaacaaaaaaaaaacaagaagaggtctccgggttgccctatctttccctttcatgtcatcgtctttactgtaaatggttggttgatacagagacttaagaaaggatgtgataggttctcctgaatgccattgccttctctctgtcttctaagcaacttctggttcaaagggagagcatgagctcctggggatgtcagtgttcctactcagcctgtagatataacatccttacctattatacagaggacacgatatagaatccggagagaggaaaagcaaaggaggccagctttggcctgagaacttaccctagtcactcttgcctagaagacagtaccaacctcccaaggagaaacattgggggataaattcaaataaagctgtttgattcagattactcctatatgtaagtgaatccacaggatcctgtgccattggggcatcaggaacactatatgaggatgagcagcaaggaatggaagtggacacacacattgcatgtatctcctctgcttgctttcatgccgcactgttccactgaacttcacttacaaaacacaagtgcaaagataaatgattaggaatttcaagatggtaagagcagagcatacaacctaacaaagggtctttgtgagcaaaaaaccctgtggatgacctcatggatctcatgcctgtgattacacctgctacatttccaacacccattttgacagcaaatgagtgttgctgtttatgaactggaacggggaaaattattagcctcactgtctatcagaaatgagaaacaattcatctcatctctttccacatagaagttctgttgtgtttgcttttgtaaattattttgaatcaatatctaagatgggtttatctatttactactaattgcagcctgggaataaggatgtgacttctggggttgagtgggcccatctgggtttctgaacttctcaatttaatagcacctgaagacattccctacctagagattttttatataaatcatagagctttatgggaacccatcctcccacatttctctgtgggaggttggtatttccttctaggcatgaatagggataaattctcaatcgaaagctgacctcctctgcatttttcctctactgggacttcataccatgttctcaaattgactctcatttttccttcatagttctgtctcaaacttactggccacagatcacttgtaactccctattttattaagtccagtttcaaataccaaaacttgctttaacttctgctattgctgtaacacctgtctctgacttttctaacattatattacatggctgagtgggatatactttttttttcacagtgtaataaggaaaagatagccttgtatttctagaagttgtattttatattcacttcattgcatttgattgttctggataagttttctgtgccacatactaagttttgggatgtactaacatgcactcttttcttgtgtttacatcttcttgagcttgcatctctttcttagagggaaggcatgagggaggaaaataagaagaaagaaagggaaaaagggagggaaaaaagtagatttggtctttggagcttcagttaaatttcccttataatggttagaccctaaatactcaaaatgagtatttgtggtgaaaacaaaagagctgacagtggaaacacagccaagcctttctaattagcaatcctagagaggacagcaccaataagaaagaagagcagccatcaaagccaggcctttatatgtatgtaatcaacaggcatctgatctagattcttaaagatggtgtggtttgggtgggtgattttatttattttatttttctgtctcctaaataatatgtaatttcttcaggccaagaaataaattgaaaggatttagagggatttgcttatcagtggaacaccacgtagcattacattcctcctgcttttgggaaggtacattgaagtttggttaatcttctgtggttcaatactcctcttccctctgtcagcctgccttgaacaacagattaatcccttttccacccactctcttctccttcctccctcccctctctcttgatctacccttccctttttgagcaaatagaagaaaaatcttaaaagtggggggaaaaaaaaattaaactgctgcactacatttatttatataatcctagaagacctcaagggtagaaataaaggatcccaatcctcggcacaaaatttggccaagcttagcttggtttttctactgttaattaaatcttgagtctgcaaagggatttccttaaagactaattcattagcaaaagttattataagtcacgtcattctttatcctgctctagtatatgcattgtggaaaagaagaaaaagaatatgctggctattgaggatgggtagaggttttagggagtgggtgatacgatttgcttgaattcctatgtagtctgctgtctttagtgacaatgaataattactgttgggtgacgcttatgagcccaacactaattttaagattttatagctaatgatttggcaactaatcagtgttttctggtttgacttggcttaaatctcagtagtctataaagtccatgaggacaaggaccaggtcagcctggtcccaagcacagtgattgactggcacatcataggcaattaataaacacttgtcaaggaaattagtgagtgaatgagtcaatgcaaatgtcagtacaaatgtaaataaaatcatatattcagaatatttttttaattcagttttagagagctctgttccaataacctaattttggtcagacagaatgcaatatctttagctcagggtgattctctttaaagctatctcatttcatggctatatgagcaagtaagttatgcatgtagtcatatcttggcaagtgattatcttcaggagtaggtagagggaagaggggaaagtaatagctggaagaacccatggcataaaccttgtaagacagttttaaaattcacagggtgttgttccaatcgaaatacttaagctcatagacataggatacaagggtcaccttagatagtatcttaacaagactagaattctgtcccttcacctccaacattcaggacctgcttcatgagatgcccccatctttcacacctgagtatgacaagttagagtcatttatgtttcatttgatcataacaatgtcagtggctttcaaaggtaactataaatgggatgtttaatcagaataaaataagagtataggtatgacagtcatacaatcttaccacactgtgaggttgtttctgtattgggcttaaattgagtgagtgagagggatgggggagagagggagataatggcttctaacaagcttgcccaagctctatgttttttctagttttgattacatataaaaatcattggcaagacatagtggctcatgcctgtagtcccagcactttgggagcccaaggtgggtgactcgcttcagcccaggggttagagaccagcctcggcaacatggcaaaaccctgtctctacaaaaaaataaaaataaataaattattcaggtgtggtggcgtgtacctatagtcctagatacctaggaggctgaggcaagaggatcacttaagcccaaggaggtcaaggctgcagtgagccatgattacgcccctgcactccagcctaggtgactgagagagaccctgtctcaaggaaaaaaaaaaaaaatcatccagttgtatgtgtgggtattagcactgatcaaagatgagactgtgatggccacaatttagtaaagaaaatcttaatagatacatttaaaaaaaaggtcaaacttttcaaatctcattaaaggttataggtttacttagagtcaataggtattaggtaattgaaaaactcaggcagcttgtatttaaatagagaatgaacattcataatgaagctagatgggtcctctctcatctgagatattcagagctccaactccatctcagaatgaaggtatagaggggaaagaactaaaacagcaaacatttaaaggaatttaattctttttagcgtggagcagctgcagagatgtatggctgttttctgtggggcttcagaatatttatgggcctttcccttttcctttttcaccggaagaaaggagatcatcattcttgagtgtgttatttataatttcataaagctgttctgtggcaggacttattttatctcatactaaatctcaaataactgtgcttccaaggagatgggtggggaaaattgattatccctcaaaatgattagcctattaccagtgtaagataaagagctgaagggtggaatttgaagttacaaaaggcagttgggcagtaaggaggggacagagtgaaacggtcttgagcagttctgatcacagctcacagcagtagacacttttctcatgcccaataatggattaataacgaagaacagtgtagaaccattgccaagaaagggtaaaacccttctgagtacataattagaagccaatgattatagaagcaataactcactggaggaaaatacgtcagatttgtgaaacttagggaattggaaggtaaatatacccataaatttacttgggtggacagagttctgagctttcttctgtcccagctttattctaaggtaatttcaataaacaatgttaggaggaaaaaaagaacataaatgcaataaaaaatcttccaggaaaggaatacatagggctcctgccagacagatattttattgaaagttattataatacctatctttagttttatgagtcctaacacagaacaaagtaatttcaacacgtggattaaaaatatgaaatacatattttaacatgtagtagtatgaattattgttttaaatataggacttggctaatatataggggcagaggaatatttttctccccttgagaaagcaagttaaggtgcttaatatgcattgtgaaactgcattgcagtcatactcatgcactatgttctataaaccatgtgtagtagcttccaaccaaatgggacagatgacactggtgagatgcagggagtggagaaaggagagaagtctgatagggcaggacatgaaattcatgctcagtatctaagttttcaagaacaacatagctcaagtagtggtcacactgtcattctagtccatcccttccctccagtcatcctctactactagtgggtgtataaataaaccgtgttttagacctctaagcctttgcaaatactatttcacctgaaatgcccttctccttctccagcccacccgtcctcacttccttcccctgtctcaccactgcctgtccctgagggctcatttcccacatgctctctgccttcttgctatttccttccttcacacattaatgcttcctcttgtcagagcattcggtttactacatcaagtttgcctgtttacttgcctgtctcatcagactgtgaattcccagagcagaggaactgtgtcttatctatagctttatcccttataactgttaaagtgcttgacatataggtgtttgaaaaagattcattaaagtaatgaatgaatgaaaaaagcaccttgatgacatataccactgacagtaaatctaacagcccagccactgtgaaaattatttggtgggtggtcatagagtttttaaaaaatgcttccttgaataacttatagagaatattggtatttgacataggggaaccatcatacgtcagcactttaagcatagccattgaaagttatgagagctttagacaatcattgtgaggggaaaaaatgtgaagatgacattgaacgcaacttgataaacattcccaacgtaactatgaatagaagagtttcctaaagcaacactgtttcctggaggagcgtggatggtggacagttaaaaataacaattcactacaagtgtttatacccttggttacagtgaatactaaattaatgtgaattaacagctcagcacaaagcctaaatgtagccagtgtttattaagtggtaaatgttattagtaggcatgagtctagatagtctagatatccatttctttgcaggcatactaactgctctttcttctaagtaattaaaagtaattacagacaatggttgtgattataggaaaatacacagacatgcagcctaaggctaccacattttattaaaaggcagagatccaccaatttgttctacttatagcaattctattctgagtctgagtctatctgcaacatgaaacctgttttacaagccatggaaagcaatcaaagaagtgtgccttttctttcaaggttcaacatcagatcctgcatttgcttacatctgaaaaagaacacagactgaaaaagccaaaacaacaacaacaacaaaaaactgctaaaagaaagccctgggttttctgaaagtatctttgaatccaattgccattaatttaggatatgatcttaagccgctcatatcatccaaaagccttggtttgtaatgtttggattttctagatgttagggacaaaagtagtttcaaaaaagtctaagtgtagcattcctaattctaagcctttttgcaaattaaggcctctggcagaggaagtctttccatactacacagtgttctgtggcaggtgtggccaatgttgcatgccaggttcttgaggaaaacattggttaccaaaacaggcaaagagggactgagatgtttgtaactgctttgggagtttcagttggctgtacctctaagtggtaacgatgaggtctgaaagacacaaaggaaggaactgaattcatataagacccacacagattgtctagattcacagccactgagaacagatcacctttgaatgattgtttaagctctttatgagtacatttttctttatcactcctcatggcaggtgcaaccagaaatagtatgtgtaccataaaatggaagtaatgaattgtcagcaacaaagaacacttctaatgtggggtaaatcgtaacaaatagagcacataggcagataccaaatttatttaaattaggagtggctatcaggcttggaattactttgattgagaggctgatgttgattaattgtgaagttaaactatgatgttgattaatagtgaagtaactaagtgacgtgtgtgcacgcacacacacacatcccaggtcactttctgaatctacgtagaggagttgggattcacagttgtgctatgtctagggccaggcccattcttacgacacactgctggatcatttccccttcaaactcctttgagtctgggcaccattgctaggagctactggtaaaatgtggttctgttgcctgggaagaacactgtattcacatgtactcatatagaagatcaacagaaaacaaatctttgggcaaagtggagcgcagagagggttaaaggtggaaaaagggggtcagaaggtgaaagatgatgtgtggggtctgcaatggggattaggggcccattcatgggatggaattggaggtagagaaggggtgggagagtggggctggggatggtgtcacctaaaccacaggggagagaaacttagtagtatgagaggaagccaaggaagctgagaggaagacagtatcttttcaacctcagagtctactcctttttctgaaaaaaaaaaaaaaaattacatttcttcttttggcccatgcaaatgaagaagtctcctctgagttaaagattcaactaatattatgttaatgtatgttttggtttctactgaagttatgcattgttttttaaacatttgttcaatggcctttaaactttattgccaggctttcagttcttgaaaggagctcattagattttcattaactcaccagctttcactcaatactagggaccaaagtcctaccgggccattctgcaaggcccttacagtcaaatcattaataatttccagttgaacacacttcagcagtgtattctcagcctctttattaccaccatcctaaggagttttttcagataagttttccccctaattgcccttttcccacaacatttcaattccaaagatatactacatattcatttatgtaactgtggccttttggagggtcacaaaccattgtaatatttaagattgtccctcagcccaaaccaaactttcctgcctttggtgggagacattgcccctataaagaatgcatgcttaaaaactactaaacaatgattgtggtccttccaaaatagtgttttcctcttataattgccgtatttatttcaacagttaactcttttcccacttaccagctcctttccctaagtaactagaagtagagctattatagggccccctctcagcaggaaacaccaagggaatatgcttaccatgtctctaacacaaataacagccccccaggatgtaactaccagtttcagttgctggaactgaaatgaacaattcagtagtgtgtgttttttttaagtatgtttaaaaattcttttttcggtgtggagaaggagagcatcaggataaacagctgatacacgcggggcttaatacctaggtgatgggctgataggcgcagcaaaccaccatcgcacccatttacctatgtaacaaacctgcacgttttgcacatgtatcctggaactttaataaaattaaaaaaataaaaattctttttttctgctagccttgaggagcaaggtttgaattatacccctttcagatgtagaataaagatcaatattgttgtgtagggcacttctctgccattgttaattaaatcaatgaattatctaatgtggtttttccagttctttgctgtgtccagtaattccatacctaggatgtctatttaaaaaaaggatgttttctggaactcctaagtagaaaggctgtcatatatattcatttattagggttgtcataacaaaatatcccagaccaggtggcttagacaatagaaatttatttcctcgaaattctggaggctagaagcctgaaatcaaggtgtcagcagaattagtgtcttctgagaactctccccttggcttgcagatgactatctgccagcgtctttatatggccttcctcccactgggtatgtctgcgtcctactgtcctctttttagagggacacaagtcatattggattagggctcatcctaatgcttcattttaacttcattacctctttaaggctttgtatcaaatacagtcacattctgaggggctggggagtaggacttcaacatatgaattttgaggggacataattctgtccataatgtaagaccaggtataaagaagcctattgcaagccacaaacacagaatttgactaagatgtatttattcaaattcccactatgtgttttactagctgtatgtctttcagcagctcacttaacctaactgcaattctaattagtcatgtaatagtcatccctgtcccaaaagacggttgtgagaatcacgtctaattaataactgtaactaaaaagtgtgtgtgtatatatatatatgtatatatatatatgtgtgtgtatatatatatgtatatatatatacatatatatgtatgtatgtatgtgtatatatatatgtatgtatgtatgtatatgtatgtctaggacagcatctggcttgtagtaattgctcaatagaaggggagtggtttattacctcttcctcttgaatttggatccagactttagtacatttgggaattggaagatcaacaagtcagtaaatattggtcacatgaagaaggggaaataaatgagcattattgaactataatatattgagtcttcttatgcacatagtaggccaaaagttttgttttttgcataagatctgtagattcattcattcaatatttattgtgcatgcaatatgtaccaaatacagaaagcagtcatctcacctactgtatggagggctcttctcacagctgatactcagtctcctatatttcttgtaatagattccctgggactggggagtttctgcgagactcagaatttaaaaggtgcctcaagtcgaactactattattgcagtcagaactgtttttgctctcttcaggaacagccttacctgtgttcagggactattgtgtggtatcatgctactggtctacattaccaattcagctattgcagcaattacatgaaggaattcttgctaatgataaaagccattatgcagttcctaaagagaatgcattccacagcattcattaattatgccagcctgtagatgcacaactaccacggcatacacttgagaccacacaccataaggattgaaactctctcaaagccacaatgtatgtctgtgttgctttgcactcttacattgcccatcctttacaacagcccttctcctgtccttctgattcctaaaactcaaaaccagaatgaagtaaggctacaaaatgtcatttatggggatgggtgaggcttaagtctcctggaaccatcttgggtcactcagctctacggaagacccccctaagacggtctagacccagagtcattctcagtcacacagtagttaagaattcttcatcctacggtatgccctctctagaaaaataatcgtaatgatgggagatgggacacagtgataaatctttgatgtctttgttcattagtttccttatctctctctcttctctctcttcccctaccccattattttctctttgacataaacagccaacatcagatgatcttgtttcatctgctgaatgttcaagtgatgatgaagactttgttgaatgtgagccgagtacaggtaggtcaggtcagtcttattttgcttgctttcttttttcttttgcaaaaaacaatacatacatatatgtgattatacatgtgttttatatatagattatagtgtgttaatgtgtgtatatttttatatctatatatgtataagtatacatatataaatattatatcaatgaaagcatcaaatcccatggaaagagcaataagatcctacaaaaattaagtcagtctcttgatagctaacaaaaaatcatggtatatgacttaacattgggcaagcagatgcccagacttaccactggagcagcaaatgtgtaggagccagtggcagctatgaaattcacagagggtgggaacatgaggaaatatatgttggaatgacatcaagaaaggatgaacccatggaggagcttaaagattggtaagtggagccataaagattggtaaatgacttaaaactcatgaattattctgagctaagagaaccaaaaatatatgtatatatatattttccatgggatttcaacagcagttaacatggtattatctttgtactaattttgttaactgtgtgtctagaaaacttgtgcaacaatatagtaaacacaaaattagtgctgtaccatgccgtgtcaacagctgtgatgcttcaaaatgtatctactgtgctgaagttgagaagactttagcaatcagaagcttcaatgtgttccccatttggacccagatacattttgatgttttatggtctttctttatagtgagctacatatgacctaatgtccagcaggcaattgcagtccctgattatttcctatcaacttttcccagttgtctgttttgagacttactataagttaaacgtttatatgtatataatagagaacagatatcatcgaatttctgtgtatgtttaatagaattaatagctggagttgggccaggatcttatttctgtgaagactaaaataaatagaattttctagttattttttgcattgctttcagatttttttccttttaagaaaaggaaagccattaaaaattctcttttgctaattctagaaaatttaagcttcatgaaaaaataatctaataaaaataaaaaccttccatttctgacccctaaatgatttacaagatttcaaatctgttgaagcctgactgctttggtttcttgcaagtggaattggatccaggaagttctgtgggttcatacccttagtatgacacagggacacatcattaatatgatagggcttccattctggagtgtaatctgttccattgggagctcagctgtgtggagggaaagtaaatgtgatctggtcagggctttctttttcatatttttaggtaataatctgtatgtgctatgtgaggttttaaccctaaaagggcagatacatccgaactataccagaacttgggtgccatgttttcattaatttattcattcattcattcaataaatatttttgagcactcaggcaggatacaatatatctctagatttgagtccttcctattctgttttttttttttaagaaattagctgtcagagaatagaatagttttgctatctaactcctcgcgtaattcaattcaacagatatttttgagagtcaactgtatatgttaagcatgtgctagatattaagggttcatatattaataggtcacaatcctcaatacgtacattaaattagcttgttttgtggcaaaccctttaagaaatctaggctttaattttatatatatatatatatatatatatttttttttttttttttttttttttttttttttgagatagggtctcactctgtcacctaggctggagtgcagtggcgtgtttatagctcgctgcagccttaaactcccgggctcaagtggtcctcctgcctgagcttcccaagtagctagaactacatgcaccactatgccagctaatttgttttattttgtgtacaaatgcggttctcaccatgttgctcaggctggtctcgagttccaggcctcaagaaatcctctcgctttgacctcccaaatgtttttcttcctttcttagcagtgatatctctatatgcagcaatgtttatcaaatctgtagattttaaggcttatcaaaattgaggcttggtcattctgaaatattatcaccatctttcctcaactactcaccctgcctcagaaagtcatctccacagcaacattcataataaggcagtgggcttttccagatctcagcttcagattctctagctctgtagctccccagtttatgggtatatattgctatttgttatgagacttgaatagcgtaaacctgaatggccccaaactaaatccatttgttttctagaggccacgcaggtattttctctgattcagaagcagaggacagaaattcaacaccaacatttcttgaataacatggggtgggtggggagatacagtttttagaacaatctgttgtgttctgtaagggagcatgagaggagataaagtgagtgacagaacccctacctttaaagagtgaacatgtagctctaggaggctgatattgatttcctccacctgtgattattcaactcatcacatttgaagaatgagcattgcatttttctaattttatttactccataaagtattcctggtgagtgatttggatatacagggaaatacgtcagtggtatatttaatacaagaagtaggtagatattcctagtaatgcagagagagaagaggtttgcccagaggacctgatttccactaatggggattacctgcttagagctatcaagccctctttttcattacataagaaatatctcctcagaagttcaagaccagcctggccaagagggtgaaaccccgtctctactaataatacaaaaaattagccaggcgtggtggcaggcgcctgtagtcccagctactcgggaggctgaggtagagaagtgcttgaacccgggaggcagaggttgcagggagccaagatcatgccactgctctccagcttgggcaacagagtgagactctctctcaattaaaaaaaaaaaaaaaatatatatatatatatatatgtatgtatgtatgtatgtatctcaggcttcacattttccaaaaacaatacagattaaaatcagaaatcagtttcttgggcaagatttgcactgcctaaagagaagggacctactgcccatgcagcaacagataatggtgacatttacacatctttgacataaattgccaatcttgcaattctacattaccactaagattaaaattctggttttgaacaccctaattcactgcctccatttctaaaacatttttccaggccttttgcttgatggaaatacactaaatttggctaacttccttggccttgttctatcatacttactactttatcttctttcactttgccagcgagtttattattttctagctgtctccgtttatgaggcatttaacttctacaggttatttcctgattaatttacatccatttgaagctctcacttttcataaatttgggtagtttagtgtgtgctataattcaatttttattttcatatgagcatcaaattttaaatgaaataatttattttttcttcaaatcacattggatttttaaactgctggttttgagttagttataagcaatcgcctttcactctcagaacttacttttgtgcttaagggtcaccacggtttggtatagcttaatcttattatatttaggaacaaggtaaatatttttggagtttggtcaataggagtctagaaaccttgcaaatccaatggaagtcaagttttcacggtatatttttgctggtaaatatgtagagaaatttaaagaaatcccaaatcatgagagcaaggcataaagtaaaagctcaattaggatttgtcgactaaattagtttgaaacagaactttatatctctaacttcatttcccctttaacagctaaaattaaacctattgactcatttaaaatttatgatttcatataatagggctgccctgacaaaatctatatttttaacaaatttgttttagaatttttatttctttattttgagactgggtaacaagactggctaacttttgtatttttggtagagacagggtttcgccatgttggccaggctggtctcaaactcctgggctcaagtgatccatccacttcagtctcccaaagtgctgggattacaagcataagccactgtgcctggccaaaacctacatttttttttaacaaagttattctctgctttttcctatccctacctttttctgggaactagattattttataagtcacagatacaatcacattttctgaatatttgcttcaagaacccagaattgaacctttaaacaataaagttataataaaaccatctgcatcaaatgaagatattcagaagtgtatctgaatagctatctagaggcgagggtctggattttaactcgatttgtaaatgttaattgtgttcttcacaaaacaaatcagtatctaatactttagattcgttctttgcatataaactgtttcattcccaactgcacttctattaatcttaaattgtgcagtaaattcatatttcattgtcctttttctctttgaatccaagaagaaaaacggatgagctggagagcattcaaataacccctaggaaaaggataccctcatgagattatggaagccaaatagcaattaagatcattagtaaattcacatttgtaatctaaaatgtgggaatgaattctgaaattcagagaaaataatacaattcacttcccatttcttctctttcccttacccctgctgctatccctagaattcccatctttggaaatagagtaatagtgaaaacaaatgtattcttggatgagcttttgtataattagatatgatcaacttcctggattttacatttttatagtttcaagattctaaaagtcttgggggcaggaggccacagagcagagcgaaaaaaaaaagtaatacttttatacctaataagtgggcatggcaatacttaaccacattgattcatccagtcgttatccaggggtatatttttcagtttgtcaagtagctagtttttctgccttcacttttcttaaatgtcctttgatcaaatctcaagggacagcacttccaccagagggcagacagtaaaaggaagtgaagatgaaacacatccatccatcaataagactgtgctaagcagctttcataatggttgggaaggagatgtttaaactaatggcagtaatatgagatgacaaaataattgctattcccagagtggttctcaggtatatttttactcctcaaatctacaatattcacatttgcatttcggtgttactgctacttagttcctctttgttagccctactataatatacaacccaagctgagtgaaatttaaatttggcataacaccaagatcacatctagtattttccaggtggaactggattcttaatctttatcagtctgagatgcctcgggaaagtatcatctgaaaatctggcactgagttactaaaagctcaccaaatcattttactttttatttgctggaacatggtagaaaatgcagctgaaatgttaatagataataataattttccagtgaaggatcaagagaagtttataccagaatttatagataacaagtaaatgtgctgattgttggccttaaatatgatgtttgaaatcttatagagatacgttttgtcatttgtgtctttgtcaagtttgaagttagcaacctgtatgtttttattacaaataagtcaattttatttaactatttattcactttagatttttctatatgaaaactcattagcaaatagaatcatgttaaaatttcattagtcaatggctattcagaatatagtacaaaaataaatgtccaagtaaaatctcataggaatgttggagtatgacagatctataaattcaatggtctgtaaatgctataaattctgataaaaggctcagatccacttaaacactttgaccaaagagataatggaaataatctaagataagcattttagctttggaaagagaactgtatatcgatagaaaattacttaatttaattcattattattggctgtggacatcagtcattttaaaatttgagttacaatacatgtctaatgctcacaaaagcaaatagttgttcacatacttaggtctaggctaaatcatatccatttttcaaccgccttcattgatctataaatgaatatagtatgttcatgggagtataatgttccagattaatgatacagtttttgtctttgttaacccaccaagttatttcactttcttttcttttttcttttttcttttttttttttttttttgagatggagtgtcactctgtcgcccaggctggagtgcaatggcatgatctcggctcactgcaagctccgcctcgtgggttcacgccattgtcctgcctcagtctcctgagtagctgggactacagacgcccgccaccacgcccggctaatttttttctatttttagtagagacgggttttcaccatgttagccaggatggtctcaatctcctgacctcgtgatccacccacctcagcctcccacagtgctgggattacagccgtgagccaccgcgcccggccagttatgtcacttttttataacagccccaacccaacccaagttattttttaaaccattgcagtaactatgtgcttttaaaatccttaatggtgaaatgctttgaaaattagggtaagaacagaaatataagaataggaaagatctactaattagctcttgcactttaggctgaggaatagtgtgcataatatatgtggcccatagatcgactattgtggatttcataacaaatatatttaataataaaaaaatgaaaaaaattctatccaactccattacccaagattttttagtaggttggagagcgaggcaggggaatccataaaatcaatgtatgagtgtatatacttctatctgaaagtttgataaatctcttctatatgtaacacttttgagtaactattacatgtaggcactagaataggtgctgggaaaacaaaagtattttgcttcagaaatatcgcttccagaagttcagtttattaggaaaggcagatataataagaggaataaaaggaagggaagaaacaatgaggacaatgaatggaaatgcccacgatattatcagcaccctaaggatgttggagcactccaattcagtgaacagcataccttatcagggatatgcaagaaaaaaaaaatcacacaagatgatgccaagcagtgacagattcaactaaccccaaggagcattcttctgtattttagtttggtgacacagaattctcatttattacgattgaagaattagtacagttcagtaaagtaaaaaagcaacactcttttggaattagtacagctcagtaaagaaaaaaagcaacactcttttggggacttcacatatacagtatggtcaaaggccacaccgtttttaggtaatagggtaaaggatggacatgttgaagggagaatttcaatctgaactcatgagaacttcctgattccaaatgccaatgcaagtggtacataaggagtgagcttaatgacatcattaagcaagtcccccaaaaataaataaagagggattgggttttaaaagagaagtttttatgggatttattctttttattctacatttttcttccataagccccaagtatatgtactgtgtgtatatatatatatatgatatgcacatatgcaaataatatactgcctgtcactccatatatatgtagacacagtataagtgatattagactaatgtaaccagagattaacagcccctaccatcagtcatgtgtttacacagaaattcacaccatcattcttaaccagcatcagccaacatagacatgcatgatactgttttaacttggcaaacaaagcatgttgatttttctttaagatttctttatcataattataatgctgactccataattcagttatccttgggaggggtggaaagaaaaaattatacagatatatctatccgtatatgcacattcctgtgtatatatataaatagatatataccttgtatatatttgaagaacattttgttgtttcacctcatcttgtgccgcatgaatttttggtggttcaatttattttgttttcatatttactattttgatcattatggctatttttaactcattgctatacttttatgagtaactataatcattattttcaaatactgagagatatatagatatacaaatcaaacaaggcaaaaaaatcttttcttgccatcctaatctcaaattcctcccctttcagcatatccctccagtatttatctcaaaacaaaacaaaccccaacgaaatccaagaaagttgtgtacaaaagaatgaatactgtgttttcctcttcctccttctatgcatatttttccttttaatttccgtttctttccttttgatttacccccatatctgcatggaccacttgcctttactttcccctttatgacaatgtaattaattgaaaagataagagtcagaaaaaaataaaagaaaaacacatagaaatgacagagaaacacacccctctccacaaatttcagatggcataaaaagaattttattgcagatatagaatatttgttgtatcttttatttctgtctggacaagcccaggatcattgtgtggcatgccgtgacaagttttgtagcgcatcaactaaccatggcctccatcacaagtgcatgacaccatcttgtgtttcatccaagtgacacatctaggctaacccagcaagtccagtgtatgagttgtgggaattacattcttttgtagttataatttcatgggtccttgtttttattattatttccattggatcatgacagccctaagagctgctctcgcagcatctctgtatggttttgttcttgtgttttcttttcttggcacagcagtcaagcatgtgtctcttgtttggcacatctgtcttgccatcttgtcttgtccactgtcgtggtgttgttctgtgattctgttctctgtaagatgtgatttgaaatcctctgcctttatttctcactctcctattgtctctacttttaaccttacccctagggaacttcacaaagaagcaaaacaaactttcagtcacattataaggctgatcactggtttgcatctggaagtcataagttgtactttttacctgacttaaggaggaaaaacttacagtgggaaactactgataattatactcaaacagcaaactgatcaacgacaataagaaacccttgttgattatttttggtatgattaaatgggcttactgttaaagggacttcatgtaagatcttatttccaaagagtttttttcataaattatcagtcttctagtcagaaacttttcttcaggagcagatcaacggaagatgtttttcgggaattgttagtgagggagcatcatttctgctgtgtagaacagtgcctgttcctgaattggggaggaactttatggaaatctgcaaatgttttattacaaaatgcatttatgtttatgtattaaaatataaatgtgttcagcaaggcatctgaggatgggaaaaaaaaactttttaactcactggttccacctcatgcatattttgaggtaagattatcttttgatctttctgagtcaactgatatacattttacttttttattttttaattcatggaagcattagagagccaacacttcaactttgacctaaattcattcttttcccattccagagaacacgacatacataatagctttagttctgagaatagagtctgaatttgagacaaacgtagaaggaagtgcccagttaattatccaaatgttggactctacctgtgattatccaggcgatttgatgctttacttggaaggatttgattagttggatacgaacagcatgaaaatgacactttgtaacaactttccctctttaagggttgagcacgagaatatcaaataggtataaaaatgagtaataggtgatatattaatagattaaagattattcaataggcctaaagatttcagatgaaaaatctgtatttgtaatctgaaaaagagaaagcatatccagacctgtggttttctgatgagatctttcagtcaggccagggtagctattggtttttcttaagggtaaggggaaaaaggccaaggatgaggaactggatggctctgtggactaagaacaactttctgatgaaagaaggaagggaaacaagaaaggcgaagaaagaggaggagggaaatgtaaaagaaaggaaggaggaaaggaagagatattgattatgagccaggtaaagctgcttgctgataaatattttaaaaccagcacacacacagagctctaatttgcagttttccagtttctgtatggtgtaaaatattcccaccatggctgatttctagctaccaatatgacagccctaaactcagaattgggaagtgtccttgctcgtacacaattatatggctttttcatcatacgtacactatagacgtcaagaacctcatagataatagtaaaatttagtaaaataattaggaagtaccgagttttaagtttttaattacctgtttttaatatacttgtaactttatatatatattaacttttgaaaatggccatgttttaacaaccagcttacaaatttcctagaaattttgcaatcagttgtcataaactggctcaagcacaccactagcccaggtactatactgggtacatgaaaacatagtattttatttaaatctcattttaagttattgtgagataaaaactagcttggtcatcttacagttgagaaaattgggattttaagtttgcttgttcaaggtcacatacctgcacataaatggtagaggtaatattcaagtccaaatctgtttgaaaatagacattttctttatattacagtgtgccagtcattctttcaacacttctcaaagtactaagttatcgaattttgacacgctcctttgtggagcttagcatgactcgggtttccctattgcctcaaggaggtccttggctttaactgtcttagataaaatggagtttaaatgtattatggttgtgtcaatggcaaaatgaagacagtgaagcaaaattagaactcctgattactctgtttgtaaatgccaccaaagttatgaccatgtcttcatgagaatgtccactttgactaattttgtttcctccaaatattcctcttttactaacattgacaatgaacaggatatttcttaggttttcatattctgtcccttgagctttggaaagactatcccagatacattttctgagcacatagaatctatagcatgatcccattacatagttaggttttataacttttaaactctaatgaattttatttagttacagtatgtaatgcatgttaattaaccaactgcacagtgaaatatgtcaatgtcctttgcttccacattttctaatagagtaagctagtatattaacatttaaaacagcatgagaaccatagtactgcagaaagcaactgcagtttttaaaaagatgattttattgtaagatacttaatcattgctctgtaaaagagtttgagaggcctgggaattaaaaaggaaagtgttgcagctttttagtccttctaatttgacaagatagataatttgattgggtttctgatagtgcagtattttgctttaatttggtgtgaagtttagttgcccccataattattattatttttttttggtcactctgtcacccatgctggaatttagtggcatgatctcagctcactacaacctccacctcccggattcaagcaattctcctgcctcagcctcctgagtatctgggactacaggcgtgtgccaccatacccagctaatttttgtatttttagtagagacggggttttaccatgttggccaggctggtcttgaactcctggcctcaagtgatctgcctgccttggcctcccgaagttctgggattacaggtatgagccaccgttccgggcctccctatatagtaaactttcgatggcagcatacacaacattgaataaagtcctttgaagtgacttctaggctttctcctataggtttgccactgctacaactttgtttcatcattcagtgaatattagcacttcctttagtgaaatatagtcttaagtacttcacattgttaactactttaatcctcacagcaatcatgtgagagtctattcttattatctccattttaaagataagtaaatggaggcacagaggagctaagcaaattatcaaggtcacacagcaaggaagtagaagaaatgggatctgaacccaagccaactgcccccagcgtggacacccatcactatgctatcctgtctcttacgtagcgcttattttccattaacctaaatatacgaaatagctgccggcctccttgataataaaagaaagtctgtgtattgaatgtattacatggttgggaagtagttgataaatgggttagttattatgtatcaaaaaggctttaacaatcttggttgatgggggttataaaattgttccattatgatttattcaaataaccgtggttaaaacaagttaccctggtttcccataaggaggaatgactccaatattggagagaaataccaacacttatgtgaggtgagtctcccttgatgtcacctatgcaataatatgtgcacttgggtttttttttttttttttttttttttttgagacggagtctcgctgtcacccaggctggagtgcagtggcgcgatctcggctcactgcaagctccgcctcccgggttcacgccattctcctgcctcagcctcccgagtagctgggactacaggtgcccgccaccacgcctggctaattttttgtgtttttagtagagacggggtttcaccgtggtagccaggatggtcatgatctcctgacctcgtgatccgcccgcctcggcctcccaaagtgctgggattacaggcgtgagccaccgcgcccggccgcacttggggtttctagctcattattcatgatcaattctgttcaaaacatatgcccagacaacagccacctttaactgatgttaggaatctaaggatagaggctcttagcgagagcttgggttaagatactgcattttctttatttcagaaataaatatgttccttagaacacagtgatttaggtgttacagctaaaagaaagcaaaaaacaacaacaacaacaaaacgaacttgtatttcttatcttagaccctttctgacacccacatgctcttgacatctcttaaagttgtaactatttgtttatcctccctttttcctcacttccttgcattatgcatccaaaactattttaaaagccaaaacacacacacactttttgtgggtctttgagtttcctatgcaagaaaagaatcttaaaatgagttataaagaactaaaaatcacaattaaaaaggaaacataattttaaaactgtgtttgcttgtattataatccttattccaaggcaagtatggcctgcacaaacatctgaggattccattacaaattatatcagtctcaacccatcccgaatccagatcataaactcataaactggaaaatgtgtatagttgaaaatgtttgcataccctctgtcctagagcagtgcttccatcttagctttgaagcacagagacctcctcttactaaaagatcatgaaaactggcaatactgtattgcccagtgttaaaatttgtcagattaattacccagagccaaagttagcaaactttttttctgtaagggctggggtgtaagtattttacactttgagcgtcttacagtccctgccctatctcctcaatcagctcttataatgacacatagcagccatggaaacaaataaatgagcagggctgtgttttcatgaaagttgatttccaaaagcagagatggagctggatttggctcagaggtcatagtttaccccaatctagagaagtcccataggttaaaaatgtgtagtctttttttttgtttttaatagataagaccttcttgcccattttatagtcgttcccaacatttgttgagttctccactaagtacatgagaccacataggatacaacaggacattaaaagcttttttttttttttttttttgagacggagtctttttctgtcacccaagctggagggcagtggcacaatctcggctcactacaacctccgcctcccaggttcaggcaattctcctgcctcaaccgcctgagtagctgggactaaaggcgtgagccaccacgcccagctaatttttgtgtttttagtagagacggggtttcaccatgttggccagactggtctcgaactcctgacctcgtgatttgcccccctcggcctcccaaagtgctgggattacaggcatcagccaccgcacccggccctaaaagttcatctttaaggacatttcccacctttgttttagatatgccactatctcagacatgaaacacaataacaaactaaaccagggtcatctccacccagcttgtacactacatatttgggtaggagcttaacgtcttgcccttcgctttgccagtgtgtcttctgagctccccacctctgctaggtgtgggctgcattcacccccaattttagacctctttggcagtagcttccttgatctcccgcccacatactgtgtcatatcccagtaattcttccccaaaccttggctatgggttattgagctgacaaatgtctaaatgactgagatacgatttcacaacctgctgagagcctcttctttccctgtactctttgatttgtagctttgtaagttttgtgaggaaagtgggaaaaacattcttggtgacacaggcagtgaatgaggaggacacaatggagtgggcaccatatctaggactcctgcctgcattgcgagcaaaagcatgtatttatatcttagccctctgaatgttagaggtagcagattatacagtatggtgcaggaaggagcatcctatgtcctgaggtgaataacgtgttctaccacctggcagcagattagaccagatcaggctatgagaatacaggttcacagccagatttagtactaccagccagatttagtactactgcaaaaatggcttttccttaagaagtttttgtttctaacttttattttaggtttatgggtacatgtgaaggtttgttacctatgtaaacatatcatgcggttttgttgtacatatcatttgatcatctaggtattaagcccagtatcaaaaaattatcttttctgctccctccatcctctcaccctccctgctcaagtagactccattgtctgtcgtttccttgtgttcctaagtcatcatttagctccaacttgttgagaacatgcagtataagttaatgcttactctctttaacatctttcacattagaaatctatggagaagaaatatgaaagactcatatataaacatggggcaaaccatgaagctaaatcttaatgtatcccaaaccccagagggagcataaggttaactttgggtggccagggtgcttagtgataacattatgagctttctacattagcagggccccctggtgtggttttgtgcctggagatgtaaggttctgaactacaaaggaagcaaacaaaatgaagagatgatgcaaggaggcaaaaaagatggaggcattaggaaaggctttgagggcaggaggcacggggtcatcttctaaaataacctattggaatgcatgttttaataagctttgaagatcaaagagattaacaagaacaagaggaaaacaagggtaaattaggcactattgatggcctgacaaggacttttttctccctttctgcttacaataacctctcattttaccatgtggctagttggtttgtttacttgtttgtttacacttactcattactagctttccctataaagcaagggaaaacactctgtccccaggggccagctgcataacatgaatagatgaaatagaccagaccagatgcaatctgcagtcatgggaactctgaactgaagagaacatgccctcatttaaaggcatccaaatgaaacattttaaaaacactaaaataaagagaccccatgaaggtcaaacaaggcataatgagacacacagtgttttttattcttttgtttcttaaattcctttaaatatagccctttcataaatttggcaggatgtgctctcagtaaaatttctggtttagtaaactcttggtgacattatcaaattaaacagcaatcccttccaaattcccctaaagctaagacctttttttttttttttttgcatgtctttttttctctgataatcccagagtttatataacctcaaactataagcttgatgaattttagagttcattgtaatgcttttggtttaggtgacaaaactgatgcctacaaagataaactgatttgctgaaggtcatggacctagtctttattggagttgtaattcaatcccaggtgtcctaaatctttaatccatgccattttattgatattatatattaagattttttttattgtatatccaaagatttctattttaaactgagataacatccaacagagaattcagaagtagtatgaaattgattatcttccctctactggacattgttgccatacaagacgatatcattgacccacttagggctcaaatatacaactctgtattattttagtcacaaagggaactaagagattatagacaagttgtgaagcagttagtggggactggaagtctcctgtggcacagactcaaatatatgctctagtgatgtgttctcagtcatgttatctgcccacacagaggacagattaagcaacctagagtactggttcccaagctcgaatttaaaactagtaccagtctatgccaaagctttcagtgacccatagtgaaatgagaaaagcaaggacaatatggtgagtctgcacaaagtcaaacttacagaactgccctatatttggatactgtatcatgtttttttggatggctaaaatcaatgtcttttacaaaagcagcattttgttactatgtatagcattcttaatcagcaaaataaaggttggcaatggtatgtcagtccttccctacagtttttctttgaagtttttttctcaggcattgaaaacaaacatccgaaaaagcaaaaaaacaagagttttaaagttttaaagtgttctctatgttgccacattagattgagtagatttcaaagactgaaggcctttttacatgtaaagttttattgtgaactaataatgatgatgttaagacccatctattttattgaggtcccaggaagttactagtttaagcatccgtcacttagataacaagcattaaggtaatttttaatttcagttaaaaaaatagattaaaggcacaaaatagatttccaaacaaacaaacaaacaaacaaacaaaaaaaccaaaaaagccaccctaggataaatataactagaaggccaagatcagtttagaagtctacttaaagaaagacagaaacttctaaggactgtgtggaaagataattcatgcctataaaaaagtctctgtgctaactctagatttttttcactgtaagccttgtaacaaaggagagagagctattttggaaagctgaattagcctacatttgagctaacatgatccatctttgtgtcaagagaaagtcaaatattatagtccccagccaaaataaggcatgtgatctacatcaaaggcaattcctgaatgtgtatctacgtcctcatcccctctcctcttttttgtctcttgggtaatctataccaataacctcctgattcatgaaatttattatctaaatattgaaaatattacactaaatttagcctaataaaaattcatgccaaatttactgagtatttattggaaatcagagacttaaggtcctgaatcaggtgtaagaattgtattatcaataacagacttaacagtgattatctctaggtggtgaccgatattttgataatcatactccaaaacatctatgtagaaattgggcatggtggcgcatgcctatagttccagctacttgggatgctgaggtgggaggattgcttgagcctgggaggtcaagggtgcagtgagccatgatcacaccactgcactccagcctgggcaacagagcaagaccctgtctcaaaaaatgaaacagaacaacaacaaaaatcgatgcagagcatgtattacatttgtaatcagagagaagggatatctgttatttcttaaaatatagaagagtatactaggagaccagcaagggaaatgttttaatatttagatacggaagcttcgccagacccgtaattttttaaaaatagtgaatcctttttcctgggttgaattatgatgtatggccctgcaaggaaagctgctggaggaattcaaagatgatgatgatgatgatatgcagggctctatatagcttaacacattagttccataaggtcagttctgttcatcaagtgacaaattgtccatggatacaccaggtggtaatgcagcagcagtgggcacaagctatcctgtaaatgacccattaccagaaagtttaaaatttctgcttggaacccaggaacacagatggaacacgaagtggctttcaccagagtcttgggaatatgcttgatcctttaaccccagcttcaggtgttgtgtacatacttaatgcctgaacagttctcatctgtacatctgctggttagatgaaaagatgcagttgcagacaagtaatttaaaactttacattcatgtctctctacctccctcttcctcttctgtctctccctcgataggatgtccagaaaattaaatcagctgcagattaattgagactctcttccatgtagggaacatctgtcactgcagctacaaagattatattaatgaattaaaacatttgattacctttaatccaagagaatgcagcagtctctttagtcatttagtttatcagggttttttgatggtttttttttccacgtgcatcttacgactatagtccacccctgaagctgtgagatctttcagcagatgttgttttccatatctttaccctttccgttgtggaagggggaaaaagccctcagaaaagcaattttggaggaggcagaaaaggtttccatcatgaacatacttttagaaacagctggtaaaacaaatggtccaagtgcaatgcctggagcatatctattcaaacaaggttgtttaaagataaaagcacccacttctaaatatcagcattagtagtgatttcctcacgtatatttaagagatggaagagcttgtgaagactttttgatttctattttgttttctgagacttctttaactcttttggttttgttagtatttgaatttatcagaagctgctcaaattgttaaaactgtatcatcatatgtaaaatatataaatttacatataacggatgcataaagatttgctttcttattctaagaatgttcttatttgataacatctatgcatagtccagaagattgacatgaaaaactgataatgtacttaggtattaccaatcctataacccaatttgtgaaaaggtcaggcactcctactaaagaacaaacgtttgtatttgtagcatttaaaaatctgattttattttgtatttgctacatttggagtcaaccttatcccttcccttctaatgacttcatttgtttaccaggctgttttgttctgcatcctctgccaaatgccattacgtaacttcctttgtcagaccaattggtgaaataattctttgtgtgcttttttttttttttttttttacggccgtccaattttcaaattatatgtggattttctgagtcaggcattgcacaaatgctgatttgttagcttgaactcgataaatgtgtgttcaccctatcagttgtcattcatgctgacttcttcctctactctcttcactctgattctgttttcatttaagaaaatttcagaagtagtgaagctaggagagttaatgagtagccacgttgaccctagtaggatcttacccattggagaaaagccctgttttaaaacgatgcacaaagaataagcttcaatgtcttcctctcctcaaccccagcatggagcacaatgcttatgtgatacacggaagtgagaaatttaagaagtgcttcactttaacttttctcaataagtaaataaaactgtcttttctagagtccaacacatcccaaagtgtgtgactttgctattttaccttaaactgactactctctgaatagattttcatgttatatagtctgagacttttctttccatcctgctggtgctggaagacatgatcataactactcacaacccagatcttaaaatatatatattgttacacttttatatacttgtattaaagcatcagttagtaagtttcatggttgtttcttctgatgtaaaagtaactgtagttatagatcctccagcacatgtcacactgaaaacctaatcacaaagtcaaaatatgtgcataaatattagcttgattatgtgtcacatgtaccccaaattacacatatatataccttcctcaaagattttttttttgtggggggacagtctcactctgtaatccaggctagagtgcagtggtgcgatctcggctcactgcaacctctgcctcctgggttcaagcaattttcctgcctcaggctcctgagtagctgagattacaggcacctgctaccatgcccagctagtttttatatttttagtagaggggtttcgccatagtggccaggctggtctcaaactcctggcctcaggtgatctgcctgccttgacctcccaaagtgctgagattacaggcatgagccgctgtgcccaacctgagattttttttttaaaccttggattttcaaataactttatagttggagaaaagttgcaagaatagtatatggaattcgttatgtccttactcaggttcaccagttgttaacatttgccacatttgctttaccattctctatatgtgtgagtgtacatgcacacatgagccatttgagagtatgcatacaaaacatatttatgtagatatgtatttcccctgaaccatttgaaactcagttgtagtcatcattccttttttaaataattcagtgtgtatttcctaacaaggactttctcttacaaaatcagagtacagtgatcaaaatcagtaaatgtaatcttgacacaaaatctcacctagagtacatattcacattgcaccagcgtctgcataatgggctttgggattatttttttcccagtctgtgatccaatccaagatcacacattgcatttagttgtcaagctcaccaacttttgaagcatcttcctgatacgttattttatttccccatttgtttactggtcacagaccagtaagagcaagtaaacttcttaaagtcctgccaggtgtgttggtgtagaagcgggaagatagagcctgtgcttcagcacaggaggaagatttcaatttttagaattaaaattatggcaaggaaggacctgtgtttcatctagtattcattccttagagagcacggatataatagtctgacaatgctttttattagtgttttcacttagctgcagattgagcatttactgtgtgctaagcactgaggatgcaagagtaagcaagaacagagatggcccttgtgggcctagtgggggacactgtcatgtaattaagtgacctccaaataaatgtgtgatgacaaacgttgatgaaggctatgaagcaaaggcacttggtgccatgagcataccatggtaggacaggtaacaaggcaggggtgggtgctaggaatgtagagaaggatgaggaaaccttctctgaaaaaaatgatatttgagcagaagagtgtgaaataagtgacagctaagaggaagaaaaaatgcattagagcttgcaaaaaattctgaacattagaaaaagtcagccatttctgggagagagttatctgggagcagcaactgtctcacaggattttgtccaaagtataaaataaggaagtgtgttaggctattcttgcattgctataaagaaatacccgagactgggtaatttataaagaaaagacgtttaattcgctcagagttctgcaggctatataagaagcatggtgctagcatctggggagcctcggggaaactacaatcatggcaaaaggtgaagggggaacaggtatgtcatatggccagagcaggaacaagcaggggtggagatgccacaaacttttttttttttttttttttgagatggattctcactcttgtcgcccaggctggagtgcaaagtcgtgatctcggctcactgcaacttccacctcctgggttccagcaattctcctgcctcagcctccccagtagctgggattacaggctcatgccaccacacccaggctaatttttctatttttagtagagacgaggtttcaccatgttggacaggctggtctcaaactcctgacctcaagtgatttgcccgccttggtcaattaaagtgttgggattacaggcgtgagccacagcacctggccgccacaaacttttatatgaccggatctcactgtcatgaggacagcaccaagccacaagagatccaccttcatgacccaaacacctcccaccaggccccacctccagctttggggattacagttcaacaagagattcaggcagagacaaatattccaaactatatcaggaattaagtaggctttgctgtccttttgcagctttgagtcaacccatatgagagtgaattctccgatcctgtactgctcctgggaggaaagggagtgggctttgtgaaaaatggagatttagtgagtaaagtgatgagttcactggaggaaggttggctagaaaaaaagtgacatggctgggcatggtggctcacgcctgtaatcccagcactttgggaggctgaggtgggcggatcacctgaggtcagaagttcaagactagcctggcaaacatggtgaaaccccatctctgctaaaaattcaaaaattagccaggcatggtggcaggcacctgtaatcccagctactcgggaggctgagccaggagaattgcttgaacccgggaggtggaggttacagtgagccgagatcacgctctgcactccagcctgggcaacagaggaagactccatctcaaaaaaaaaaaaaaaaaaaaaagtaaaattgtctttttttttttttttgcgtaccaaatcctatcaatgaaagagacaggaatagatttgactggaatagtcatgggagccatttccaggctctcatagtcttagagatgacacttggtagttcagtgtcttattgtgcttcttcaagcacatacagcctgattgagagagactcaagacagcatacaaattctaggcatttttacatctgcctagctgtagtgaattagtcatacaataattatttaaagaaagaaatgtttcctccatgttgtgctggagatacaatggtggagaggaagtggagatcaactattgatcgatttataatttacacaattccacactttggagaaaacacattccttcttcctcaccatcaccctcaccattataattattatcaattaacttgttcaatatgtaattttgaagttgccaatcatttaccagtgtgattcatcatgttaaaaggaaatggcttttacattattaatattctgcaataaaagtttgggtttgtgtgcttacagttagaataaaagaaaaatgctttgtactaagactatgttaataataatgataataataaagaaataacactttctccagaaaggaaatttcaggaaatctgtttcagaatacctgtctctaccacaagagctttctaagtcatgttttgattgctaacagcattccagtactgggttggaacatatgtattccttctatcaactgaggaacagcaggttttctgttattgcccatgcatggtcactctctgcttataaaaattcatcacttctgctgattgcattgtgtaggattcctactgattaccatttagatttgttaagtgacatagcacattttatggagtcaggagccagtaaccatcaaggtcaatagcagcaacctgaatcagttataaatgaattgtttaattacccacgcatgatcaatgtgtgcactgccataaaagattagttctagtccctgaatgtgtgtgtgtgcctgtgtgtagttctaagggattacagacttctctgaagtcttcttcattgaaagagattgcaagtgagtatcttttcagtggaatagaactgagttatggtaacaacatcatctatacatccagtctaccgtggccactgaatccaatgacttttttttttattaatatgaaggtgcctgcctatccaaagcactgcttactgtatttcattacaatgtattgcttcactcaacacactctgaatagagaagatatgctctacagcttcaaattcaggcacttcctccaagcagagcttgtttatctgtctgcaacacacttggagcatttgaaagactagtgatgaaatccattcatgctgtgaaaatgtgttgagcatcatggccgcttcctttacaatggcctggcatggaaggttggagaaggccattgttaccatataaatgactgtctatttgcctctggcatgacttgtccagacaagttgcatcattttaaaatgaatgaagttctagggagcatttttaactatagtaccttagttgtaactttgagagtttttaataagcttgcaaggaataaatttggaatctagagtagtttgttctatttctggaaaaaaaggaatgctttgtacatatgtaggatcctttacctggccacagagtttggtttgagaagtggacttgactctggatagtgaacaaaatgctttttcaatttttaaaatggaggcacctttttttctgagagcatagtcagtaactccccaaatgtgtgtctcttgtgtgatagaggaaccaagtaagagaatagcttggtgtgtgcctggttttcttccacaagtacccaattagtaaagggggcttttgctttttacaaagcatgaaaattaggggttgcctataggcctgagagccctgccagacagttgcctaatgccaccagccaggattatggaaaagaagccttggcatactattcaatggcaccgattcacccaaattgcaactgaggaaaacgtgttcatttttcaaatagagtttgagtaaccatagacacaggcaaagtaatctctccatttggtcacaatggactaaactaccttgttctattgtctaccttctctctcactgactccatcaaggcagacttgttcggtaaactattcaggtgactttgtgaacttttatttggtgcaaggctctgttaatagctgtaagtcagctgtttttggtcctccctctcattctcttcacactgattgatgaaatgggaaacaggttgaagaagctcacttttttagatgacaagtattaagttgacagataaacctttaggaggttccagttcatttcaggaacgtgttgacatgaggtctttaaagatcgacagtcctattagagatagagaccaccaggaaatcataaggaaaagaaaaatgaaggaaatatctagattcagtaggaaattgggggtgatgagagaattttaagaaaaacgcttgctttatcaccagctgtgtcattttgttcaaagggacaggaaacataatactctctctgaagcttaacagaactgcagacctattgccacagttttctcttttgcataatcttgtttagtcacttaagagctagtgagtgacagatttcacatgagaattggtcacgtacaagaatgttaatgcagaactaggtcagattatggcatttcacacatgcaagatgggaacacgcttcctctggttagacaaaggcttgacgattgcccatgcatctggtcctgctttaaaggaagctcatgtaatcatgagaactcacaatgtatccatagatttcttagatatcaagtttctatgagccttggcattgtgtatggttttattgttattttgccaaacgagggttttctagcttcacttagtatgcctggagaaagctattttggttcggcccagctccatcactctaagaaatgatgaggatgagcgctctcagtttgtaccgactactcatgagagactaagaactgatcatctggctgctggcaacattccactgcaacagctaatacagtgttttggaaagatgccgacaacaaccagattgcattaagcactttaccgtttaagatcagttttgcagttcagaacttgaagtcagcagcagatctaccttttagtttgcagtttactttgctccgagtttttcatgtcttctgtgagccccccacgtttatctcagggtggattctaacacacatatgcttatgtgaaaatttcataatactttagtatttaacaggcacttttatataagtcaattgatttcaggacaccccctcgccgccctgataccaaaatctgcagacgctcaaatctcttacataaaatggtgcagtgtgtacatataacttacacacatacttctatataatttaaataatttctagagtacttataatacccaatccaacatagttgttatactgtattgtttttgtgtttttaattgtaatattttcatttacctgcagttgttgaatgagtcgagggcaggtagatatggaaagctgactgttactacttcccttttacttatattacaatattatctatgttagtgatgttcatagttcaagagacacactaaaggaattacagtatggagtgtctcctaagttgcattgtggaactaaacactagagacaagagtcgagccctggctcaatagagccagtaataactcagtgtctttatgaccctgagccggtgccttaaattctctgcagcgtagtttctttaaacggtggttctaaactaaggggacttttgtccccaggggacatattgtcaattgtctggagatgtttttgattgccacaactgggaagatgctaacggcatctagtgggtagaggtcaggggtgttgccaaatagcctacagtgctcagacagcccccaccacagagaattatcccacccaaaatggcaatagtgtagaggttgaaaaatgtcactttaaaatgtaaataatgtctatcccattatcacaggattcctatggggctcaaccccacattttgtttaaaaaaagtaaaaaaaacataaattgcccttctatgtctgatgttactactatggggcattgcacatatggacaccaaacttttcccttaaaaaggaaaatggatttattcttttagattaaaagttataaataaagctatcagattaaaatatattaaatatatccactgaatcttggtttgtaattttatggttttaaatgaatgctctaaatataaagagaaacaatgaaaagttattaagtaggagaaacctactattcagtgactaatatagataaaggaaattggaatccatgcaactaatagacttttctattagggtacagccacagcacgtctttcctaatagaagcaagcctgaaatgataagttgtttggatcacattaattaacattcagctctattagatttgtacctgaggttgggttcattttactggtgctgatgaatatcaaactacacaatatctacgcacattatattagaataaaacatgttttacattgaaggcaaattttagattcgactcttaataatggtcttttatattaactcagataactagagatagtaaaagaatgaattaaaattccagtgagccaaactacaacattgataatagtaatgagaattaattctgtgttgattttatggtgcctttgcctcgtaggtatatataactctggagtttatgaggcatgtttatagatcttaacttcttaattttgtaatgctgtcctcttaaaatttttgcttgagacggacaaaacctcctgaatttcttcaatttacatgggcatttttactaggaaagagcatgcagccttcatcagattctcaatagggtttattaacaaaaaatgttgagaaatcaccttaaaaggcaggcagctcttaaatgcttgttctcactgaagtccttctaaaatgatattgcatggactctatcagtctcttagcagctcatctgtagaggtaccaactgatcaaaaattcaaagttcttaattgacatactcaggttttttaaaatttaaagatccagattggtagctcagccatatagctaaattgaataattatgcaaatgctgcacaatatttaattggaccttttggaatgaaaataacccaggtgtgcacaattctttgcaatctggagcaaccattctaatatatatctgcaagtgacaacatcttgtatgtaaacaggcagaggaaaagagttctggctgccctcccaggaaaatatacatgaaagaacgtttgtgttacagcatttgtgttacagcacatacatatttctgagttgtttgttattaaagtcccattgtatgaaaacaactatatagacagactggcaatccagagagttggtagttacataaacaggtcccacggctaccaataatattaacacggtattcttagcccttaagaaacaaaacacagaaatttctaatactgggagtttaaagtgccacaatggaaaagcaaactcaattacaaatgctggattccacctggagcctattcttttcattttcttacttctgtttctgccaccttcccttcttccgataacagattttcaagtactgctcttagaattgctaaatgtgttcagagaatgtgtgataagatctgattctcctggaaggccaggttattttaatctttccatttctcacaccaaccatttaactaggtattatttgtttctggacgtcacagctaaagacacaacattttacatgaaaatgtcagtgttgaaaatattatttatctatctatcaaaatgtagccacgcatctgttcttgtttgattctagtaaaccataaccctaaacatgacacaaaaggggctagtgaaatatttgccgagagcggtactctaagttaacagtaaataattgaaaataagtaagtcaaaaccaaaaccaggaaagtttgcattcattcccaatcatactttaacagaacttgcagctgccacagattcagacatcttcatcttcctgtggagcatttgtcttttcatagcagaggacaatctctgtgactttcttatatcactgagaccatcttgtacagtttatttcaaaagcaagagtgttctttttcgtttcatgccaccagtgacaatacgaaaccagatctaactgaaacttcactcaacacattcccgacccgccaccccaaccctaatagcctctcataaccaccgttctactctacttctgtgagttcaacttttgcagtctccaaaaagaagtcaggtcatgtgatatttgtctgtgcatggtccatttcacttagcataatagggggactaagttcaagagatctattgcacaacatggtgaccatagcaaataataacatcttgtattttgaaaatcactaagggagtagattttaagtgttcttagcagaaaagaaaatacaatgaggtaatgccggtataatttagcttgattcagccatttcacaacttgtatacatttcaaaacattatgttgcacatgataaatatgtacaatttttatttgccaatttgaaaaacagagaagtccctcttcagatcctgtcctatgcagctgtcactcacttggctttgtaagcctgcagacagtgtcatttaaaatattttcctctgtaccataacgcttttccttttaatgatatataagaataatatttctctctaaatagttatttctttaactttgaaataattcagcatctcatgattttgatttccatttctccatatatacattttttggggctctgttctgggatttagggctaacctttgtcatggagacatctgtttttggcagtctttgtttccagggagtgaaaatgtgtgtagaaagaattgaatagctacatcttaggtgacacaattgaggaactggatgaaagatatttgtggaaagcaacataattattcaaactggaatatggccattgccctgggtttcatatttatcttcataagcaaagtggtttgggattctgtgcaagtataaggatttaggatttaaacactaaaccacatccctgcacggagcacatgggctttgttgttgataatcatgatagtcgcacaggaaacttgacagtgacagcaggggaacagcacagtatcctacttggccactggtaggaggatgcaatttaaatcctggcatgcgtagaatagcctcacttatctgtggattgttattgtaatctacatagtaagtttcaatcagaactcagttttgtgcagttgatttccaattcccgactctgcatcattagggtacaatgttttctgtaagatttctttgtaatattatagagagaagagcagaacaaatgcagttattcctctcaaagttcagctgaatgctactaatagttcaagaatgtggattgtaatggttctgtgcattgaaagaacacaatggcaaatgacaaagatgacactaagtgtgagccacagctattgttttgatagcccactctgcttttctagttaactttcttacaaccatcagttccatatttaagactagaggatcagttctgatgatgctcattcaaactcttgccaactgacatttaatgcactttaaagttgttaaaaccaagagcaggaaatgttacacttgtagtatcaagcctggctcatgagaaagttccatccactattctggaaaaaaaatagaactagcctgcaggacacaaagctacctgtggtgatccgaactatgcttctcaaaaatctttcttttgtttggccacctttataataggagttctccaacagagaaagagctgcttacagcttcagagtacagatggataattgttgctgtgccatctctgaacatcttagattgagggtcccagagaacctcatgtatgtgaatgttagcacagtacaaaagatgggacagagctttccagagcagtaacagacagctgtgcccagcactttcttctaaaagttggagatgctggatggaaaatttgtcattgtttacatagcacccacacacacacaaaaaatcctgactcactagcttctgtgttgtcatttttttgtccatggttctattgctgcctaattttcatacgggaccctcacagtggttagtctgcacagtaaggagtcaactgtgacatcctcatccttgaatgctagactccccactttctcagctcaatattccatgtgtccaaagtaatactgttagtatcctacattattccaggatcttgtcatgccacttcaagaaacaaattatcaccgctttctaagacttaccaagctaggggtgttgtaaagtatgtatgcaattgacttttgacttttgattcttatgttgaaaggcaacatagaaaataagcttccattaatgtaatgatatagtgttaggaagacagtatctacagtccattcaaaatattctgaaaattatagtattgattttggaacagttttgattccattggccatagcgcttaccttaagtcatttttttttaaaaaaaccgtcttatccatttcatatgttttacaggcactaaaatggggcacagagactaagtcacttagttgagttaaccaataagtaaaattgccttcatattctgcttcctaatgttgtatcttctctagcaagttcaagagagcttactttctggaagctttgcttgttagtaggatgtataacctgtgggaaaagacccagcagcatccacttttacttatctccttgccttctctgaaaacacactgaacagaaatatccccatctctttctccatcgtgggtttttcctttgggccacaaatagtgaacgccactgctttacaaagttattcttttcaccactaatagttctttgatgtcattttttgtacaagtgtcaaagtttttctctagaggcttccacacagttaagttcttgcttttggattctttctaaaccaaataaataaatcttcgagactgcaggttaatcaaatgccttcaaacatgaaggctgtttaggagctaagctgcacagacattttccaacatttaaactcttcatgcagcatcttcctatctcaatttgtacccgttagccagttccacagggcatattgggaaataccttttattttcaatatttatatttgtcttatagatatttgtcctttcaagtaggacaaagtggtaatgacctgcctctatcaaaaaattctacctagtaatccaagataagcagtgtgttcctagtgagttgcttacataaaagccaatatattttgtactgaatagtatacagtgttaaaaactcagctttttgagggacccaagcaagcctaacctacatgattttacaaagacaatacttaaaagtcataaagtactaagtctcaactttcagacttaagactcataaacgttttaattttttatcccttaaaaatgttattttttggctaacagcattgaaataagcgttactatagattaatactatgaaacaggaacaaaactgttgagcagacattctcccagggaaggactgtgtgtgaacacattaaacttacgcataaaagtggagactgtaagtgggttccagggtttccccacgctgactttttaaattaaatgtggcagtattgctaaaaataaaatttagtgtttctcaaattttttttagatagatacctcatatggtactcacaagtagtgtgaaaacttaagtagtatatccatctaaagcagcacaagcaatatgtcagcaccttttcactattaccacagagaaatagtgttggagaccatattgaaaatgactgtagtctggctgaggagatattaagtgaccagatggcctctggcacttctgttttcaaagctgccttatagtgcctttctcactttgtgataccaagctgctgccatgctagtgtccaccctcgaacaccatgccactcagacatggtgggattcgtgtttctgaaggggcacagtaggaagctcattcttgggccttctggcctgcctgagactgtgctagcaatacagtctcattgtgcacaaaagaagccatttttcttaacacctttgagccattaatgaaacctaccagttagaggtggtcaaaagacaaaattacaacaaatttagcttaaagatgtattggttttacttgcaattgtagaattgggcaacaccttgttctataaaatagtatgttctgatgagctgggcaaggtgttgtctgactttatggacagaaaaggactgaagaaagcagaaacaaaatgagaagtagacaggttgtttcaacatttccttctttctaggctttaagcagagggtactttcttatgctggatcaggtaaagggccccttctgcttggttgctatgaatctcctgtttaaaaagaaaacaaaaacaccacacaaaaaaacctgacccattatggtttggtctggttggctgaggcctagggccggagtctagtctaaaacaatggcctcccctaaacttgaacagggttacattgtagaataacataacaggaaatgaaaagagaaatgtgatgctcttcaacaattggtttatggggccttttaaaaagtgtgtatagagtcaatgatgaattaagatgcagtgtgaaagaaaatgacacaggacagatattcagagatcatttgttcagttttaaaatcagattattagtattgctgttgagtcatttcagttccttgtgtattctggttattaatcccttgttaaatgaatagtagaaaatattttctcccactttttggttgtctcttcactttgtagattgtttcctttagtgtgcagaaggtttttaacttgatgtaatcatgtgtctatttttgcttttgttgcttatgcctttaaggtcttatccccccaaaaatctttgcccataccaatgtcttatagcatttccccaatgttctcttctagtagttgcagaaagcacttgtaatttaacagctcaggaagggaatcaaatcattcagaccaactgaagctttcaaaatgttactgcttgaatgggcagaatatccaaaaacatttattgtgtgatcctaacatctacatattagaaactgatagaaaacttctgatgtatcagtaagatgataattacccttgtaacatttctggaagcatgtatgtatgtatgtatgtatgtatttaaacgaatgcttgtatatctagcatctctttcaattgactcaatacccaaggaattttatctccattttacaaataagagagattatgacttatttcaggtcacagaagttggatcacagctggaactttagtccagttgggtctagaaattcaattttctttttactttcatgactaaggaccactctataactctgaggtaaaaagagcaaacataatgaagttatttagagtagtgtttctaaatctaattttgcatgagtcccttggggaacttttaaaacatgtagataaccaggcacttcctgttatcctttttccactgcccctagcagacagacttagtatgtctagcttaggtaacctgggattgtgcaaaaaagtaaatcttcagagtccctctgaatatcaattctcattatgcaattatgactcctaaggcttaaaagtatgaaataaatctgtagagatcttaggatctcctgtggaagttgtttttgtgcctaaagattagcttgtttgtaagttcccatactcagtgagaactgaatattttaaaaaactggtgaagggtggcactgtattttaacgtaaaacatgcaggactagatacagtcacggccattcaattttttaagttgtatatctttgggtgagttacttagcttatttcagcccagatttactgctatgtaaggtgtaattataattattgagtaaaataaactaaagcatttaacacgatgtctggcagagactaagtttttaatactcttaaaaacatcttctggaggtaggcttctagttaattagtgttttaattatgtaattataatttttgtttcctttctctgtcctcatatttgctagaaaaacactatgtcaaccatttgatcatactcatttgtttctaagcatatatcttaactaatctagagacccatattcattgagcttttggaatgactggaaaatttctcaaagcttcctcccttatctacggtttagtttacaaaaattaaataagcttatgatgtgtgtctcatccacccaagtacatctgcagggctcctctattgtaaatcagctgcctaaggctcaagttagacacagtcaaagccgtgtatatttagggtacataatcttgatgtcaagtgctggagtcttgggcaaacttttcatctttttatgtaaaactgatttccattaagtatgaaaacaccttggtggtattgattttatgaaccctgtacattccctgcaatgaagacagattttagggtaaaagaggatgtttgcaagaaatggtgagttttattgtaagagaacttaccggccctatagagaggagaaaacaggttggaatgtccagctgctaccacccaacgggatcccagcacaaagaaaacagtcaaaattatgttcatcatgacagagcaaatgagcttttggggaaaacagaagcaaaataaacctttttgaataatttattattctataaacacaatcataaagcgtaatggtatcagttcaggagaaaggtcccactgctcctgtgttctacgtcagtggctgcagggccacagcaggcagagataaccaagcatgctttcactgccctgatcaccattcccccattaataatttgcttggccctttccttcctactgcctgaagaaaatcaatgtttggcagctctaggttgaattactgtttattttatctttagcctacacaactgcaaaaggaaagcctgagttttccagtgcatattccaatacctgtttatggaagtgagaacgagtcagatagtgatgtattttttcagagagtttcttaagccagctgtggataagaaggtccaatttgcattggaactgctaactaggactcagggaaatcccatctggtttagagaagagtaaatgaaaataaaacagaattgtgaatgcaatgcttcaataattagtttgcaaaacatgtatccactgccttgtgtgggcaaagcaccatattaggaactatagaggactgcaagaaaaacagaaaaacagagtgggctccttttgcaaggtattcgtggctattccaggcatcctttcttctttcagcagtgatctcctgagttattactatgtgcctggcgctgttctgtggactgcggacaaagacaaagtctctgctctcttggagcttatattccagtgaagtgggggaggactaaatgtaaatacatgggcaaaagtcagctaataaatactgtgcagagaatcatgaggagttgatgttcagttagtgagcaggctggttcgttactagggaagatgtgaagggcctctgagaagtaaaattgtagcagagacctaaataacgagaaagacctagccaagcactgagcaaggcaagggatgttcctggaagggaagccagagagtatggccagagcccgagatatcctgggtctggtgagtcatagatgagactggagtactggagtaggcagctggcaggtcacagtggactttcccagtgagtcagggattttgatttggggaaacctttggggattttaaagaggaaagtgacttgatctgatttttattggatactttaagaaataaattttgttttgtatacttaaggaatacaacatgattctatgagatatatatatatagtaaaatagtcaccatagagaaacaaattaacatatctatcatctcacatagttatacattttccccttatgtcaagagtagccataatctgatttagcaaaaatcatgaatacaatacactattactaactacagtcctctgcacattagatctttagacttgttcatcctaaacacctgttacttggtattctctcacctacatgtcatttcctctcccacctctagtaaccactgttttattctctatctctgtgggtattagacattgtttttttagattccacatataaatgagatcatgtaatatctttctttctatgcctggcttatttctcttagcataaaaccctgcaagttatgtatattgtagcaaatggcaggatctccttatttaaggctgaataatattccacttaatattttataatgtgtccatcccttgacagatacttcgattgctttctatcttggctaatgtgaatataggtcgggtttggttccaaaccatttcaacaaagtgaatattacaacaaagcaagtcacatgaatttcttggtttcccagtgcatataaaagtatgtttataccatactgtgctttgttatatgtgaaacagcactatatcttttaaaaaaatactttgataaaaaatactttactgctaacaaaaatgctagtgatcaacagtattcagcgaatgtttttgctggtagagggtcccgtcttgatgttgatggctgctgacagatcaggatgtgggtgctgaaggttgggatggctgtggtaacttcctaagacaaaaatgatgtttgctgcactgactgatttttcttatcacaaaagatttctctgtagcatgcaatgctgtttcatagcattttaatcagagtacaacctctttcaaaattggagtcagtcctctcaaactgtgcctctatcaattaagtttatgtgatattaatatttaaatattttgtcatttcagcagtgttcacagcatcttcaccaggagattacttcttatgaagtcattttactaatccataagaagcaactccttaaccattaaagttttttaagaaaaattaattttaatagttttggggttataggtggtttttggttgcatggataagttctgtagtggtgattctgagattttagtgcacccatcacctgagcagtgtacattgtacccaatatatagtcttttatcccttgccccctcccaaccttcaagtccccaaagaccattatatcattcttgtacctttgtgtcctcatagcttatctcccacctataagagagagcatacaatatttacttttccattcctgagttacttcacttagtataaatggcctcgcactccatccaagttgctgcaaaagacattattttgttcccttttatggctgaatagtattccatggtggatatatataccactattaaagttttatcataacattacagcaattcagtcacatcttcaggtcttacttctaattatcttgctatttccaccatatcttcagttacttcctccactggtcttaaacccctcaaaactctccatgaggttttgcattaaacttcctcccacctcctgctaatgttgatattttgacttttctcatgaatcacaaatgttcttaatggtatctagaatggcggatccttctaacaattttttcaatttatttttcccagatccattagaagaatcactatctatggcagctattgccttacaaaacgtgtttcttaagtaagatgttaaagtcaaaattgctttttgatccatgcacagcagaatggatgttgtgttagcaggcacgaaaacaatgttagtctccttgtatatctccatcagagctcttggatgaccaggtgcactgtcaatgaacagtactattttgaaaggaatcttttattccaagcactaggtctcaacaatggacttaaaatatttagtaaaccatgctgtaaacaactgtcatctaggctttgctagtccacttaaagactacaggcatagtacatttagcataattcttaagaaccctaggaattttgaagtggcaaataagtattgactttaagtcaccagctacattagcccttaactagagaatctgcctgttctttgaagctttgaagccaagcactgactcctcttctctagctgtggaagtcctagatggcatctttttccaatataagaccattttgtctacattaaaaacctgttgtttagtgtagccactttgatcagttatcttagctagattttctggataacctgctgcagcttctacattagaactcgctgcttcactttgtgcttttatattatgaagatggcttttttttttcttaaacctcatgaaccaacccctggtagcttccaactttacttctgtagcttcctcacctgcctcagccttcatagaattgaagagttagggcctttctctgcattagggtttggttaacaggaatgttgtggctagtttgatctatctagaccactaaaatattttccatatcagcaataaggctgttttactttcttatcattcgggtatttactggaacaacaattttaatctctttcaagaacttttcctttgcattcacaactcagccaactgtttggcccaaaaggcctagtttttggcctatttcagctttcaacatgccttcctcactaagctcaatcatttctagctttaaagtgagaggtgggtgactctttctttcacttgaacacttagaggccactgcagtgttattaatttgtctaatttctatattgctgtgtctcaggaaatagggagatgggggtggggggctggagagagacaaggatagacagagagagagagagaccgacccagagagacagagagagagagagacagagagagagacggagacggggagagagacggagacggggagagagacggagacggggagagagacggagacggggagagagacggagacggggagagagacggagacggggagagagagggagacggggagagagagggagacggggagagagagggagacggggagagagagggagacggggagagagagggagacggggagagagagggagacggggagagagagggagacggggagagagagggagacggggagagagagagatggagagagagagagatggagagaaagacagagagagagacggagacagagagagatggagacagacagagacagacagggagagagatggaggaagggcaggttggtgaagaagaacacagacaatattaagttcactatcttatgagtgtggttcatggcaccccaaaatagttataatagtaacatcaaagatcacagatcaccataacagatacagtaagaaaaaaagtagaaatgtgagaattaccaaaatgtaacacagagttgcaaagtgagcacaggcaggtagaaaaatggtgccaacagagttcctggatgccgagttgccagaaacgttcaatttattaaaaatgtatctgtgaagcacagtaaagcaaagcacaataaaacaagatatacctgtatttgtttttaaatataaaaataatttgctttaatgctgaacaaaaatgtcccatgtaaaaaattcatgtgctatctgttcccaaactcagtttccacacctaattacagtaaatagaaaggagagaaaaaccaaactttcaagatggaaaggagaacccaggacagcctcaaacccaacacttagaatggtatttctgcatgcccaatctacagcaaactttcagacttaagaaggaagagagaatggataaaacgttacagaagacagtattacattttaaaaattggtaagatagtagaatgtttagatctggaaggactttaaattaatcttttttccttacattcagataagctttaatgtgtactaaattctatcccaaaatctctattctttgtgaccctactgtaccctacgcagatttttgttgactcaatactccactgcacttaatttgttttttagtctcagctagacctgaaacaactttaggaaagggatagtgtcttcttgcttacttttatttttcctaccaactagaatactaataatcattcaaatgtttattgaatgaattaatggataagcaaatgaattaatataattagttgcttatattttaccccccacactagcctatagctttaaagttgtggtgactacaatgtctagtcacttaacctcacagggcagatttgctcaactaataagattttgaatgagaaagtgcttaaaaattctaaaagtgcttctctaatatttgttactattgtgttcaaagactgttagctaccaaatgaaggtttcatagtcaacagaggaggctgaatcccagacaattacaactgaggcccgggctactccaagtgtgatctttggagtatctgactcagcaaacaaacaagaatcacctcaacccaaaaccctaacccaaatagccatcattactacttccttccaatctccatctccacaccctccaataatgatgaattcttaaagcttgaatacatgttttaattgtaaatttgggttatttctgcatgtaattttacagttattttatttcacccttgtgagttggagttaagctctgaaaaggtcttattttgatgtctttccataagattgtattccttttttggcaagagaacagatctggagttgagctcctgccctctaccaaactgtgaaatttgagacaagtcacttgtcccccatgccaacccctggggcctcacttttcttattcaaaaagatcaaagattttgtcctaactcatgaaatcatgagcattacatgtaaaattaccttagaaactataaaatattcatttcaaatgcatcaagatgttattagctatattttatgagctcagcactccttgatggtcctgaagagaccaaaggggctgaggccaaagggagaattctccttaaatctcttggaaacaatctgacagaccttagaattgtgtagtaagatgaggacataaaggaacagagggtcaaggtagtatcttagctcctttctcccaacgtgttgatactggttaagatacacaaaagggaaaacccacctaagaaactgccaggaattcttttttttttttttcattttgttttaatgctaacttaataatcatgtcttagtgtaactaagcttttcttcatcaagaacattataagctcattgatgcacaggctaaatctttatgcttatttggtgctttttaatctgtctagcacagaatagggcacaacacaggtcttcagtgtgcctttgctgaattgaaatacaaaaaaatagcacatctttcaatacttgaagctcatttttataaagtatatgtgtgtagtagggaattctaaaaactattttttgctggtactagtttatttaatcaagaggaaatatcttcataaagtcaaacaaccagaaaggacagtgcaaatggccctcaaagcttgagcttagcaactgctcccctgttcttagtcttgccactgtgtggaatttaggacttctatatgcagatagtttgttacttgcaaaccattagaccaagcttgtcctacccacagcacacagggcgcatgcagcccaggacagctttgagtgtggcccaacacaaatttgtaaactttcttaaaacattgagtttttgcaatgttttttggtctcataagctattgttagtgttagtgtttttttatgtgtggcccaagacaattcttcttccactgtggcccagggaagccaaaagattgaacacctctgcattagacccttttaatactattataggtaatatattttacaacataaaaaaatcatctgtgtaccagtcagaaatgaaggttttgtatgaaacattttcattcttcagtatcaacagcccaagattctcctgactttatttctccagccctggcccctcacctcaccatctcttagctggccccagatatggcccaggtgttttaatcttctgggtgatctgatccagcctcttgactttaaatggcatctatatgatgataattttcagtttaagcctcccttcagaattccagtttctcaaatccatctggctattcaacctttccactttgatatttaagagacactttgggttcagaagagctaaaacagaactttggattccccaaacttgcatgtcctccaaattttctcatctcttaaatttgattcaggtgtacaaactccacatttgtcatcattcttgggcccctgtcccaactctcttccccacacccagtcaagaagtcctgttgactctgcctcgataacaaattgctcacacatttcctttgctccagctacccatgctgtagtgtaagtcaccatcatttcttgcttgaattctgcaacggcttcccaattgatctccccaattctacttttgcttcccaaaagtccattctccataccgaagccaaagtaatctttaagaagtatacatctaaacaaaacacttcttcacagcaaagaaatcaatacaatgaaaaggtagcccacaggttgaggaaaacatatttgcaaaccatatatctagtaaggggctaacttccaaaatttataaacaactcatacagctcaataacaagaaaacttataacccgattttaaaaatagacaaagtaacccgaatagacattcctctaaaggagacaaaagtggccaacatgtatgtgaaaagatgcttagcataactaatcaccagggacatgccaataaaaatcaccatgagatatcacctcatacatggtagggtaggtattatcaaaaagacaagggacaacatgtgtcgatgagagtgtggagaaaagggaaccgttgtacactgtgggtgggaatttggattggtccagccattacagaaaacagtatggaagttcctaaattaaaaatggaattgccatataacccagcaatgccttttctgagtatatacccaagggaaaggaaattaccatcttgtagaggtatctgcactccatgttcattgcagcattactgtaccgcattatgaaatgggttccttcaccccttttctgagcaccctccatgtctacagaagaagttatgaggaacaaaggtatatgcagggctcgttttgtaatgctgacaacagcaatcctcacatccagacttccatgtccatgtacagggttctctactttcgttctaagtcaaactgtgattcagaaatgagccatccattctcccagaattcctccattcaccccacagacacaaaaatcaaatctatgaaaatgtttttgtatatttcataggagaaacagatgtggaggcttaactcatgtatccaatgccaaaagtcttcaaaatcttcattaggtatttgttatgccaacttctttctcagccctcccggtttgtaactttttaaatctttacccagtgttgcacgaagactgttgagatggttccctctgccttcctctctctagtattctccctgggaagtttaaaatatataatgttatgtaaagtaactcactggggccttcctcttgggcctcacctctatacactgaagacaatgctttctagcaaggaggacccatgcttccagagaggagggtttgcaactggagtaacttgagtatgtctttgggattcttgagctcaacccaaagcagttcagaaacatttctttgaaacaagttcccaagatgaattctaacaactgtaatatcgcatttggcattttaaaaattttgattttacatttagacagagctattaggacatggtgggataaaaatggtagtatcgaaatatactgtttcaaatcaaattattgtattatttgttctcaatgacagacataacccaaacacattcttagtacccagaataaaggcacagccatgaaatcaggcagttattaataaaaacctagtgtagatagctaatgaaagatgaaaatgaagctgtgacatgattatgaactgctattagcaagcaatgtcattttgtatcttagagaccaaacaaggtttgtgtatgtgaactaatggttgacttatatggtaaagatatacatgcattatattcaggctatgttggcttcatttgaaactacagcttccatgggtttaaaaaatacacatatgatttgcaaagtgacaaccctaaattttcgtatattcaattgttcaaaccagtgatttctagaatgtaagtggtgtcctacttgtaagagttttaaaacaggcaattttggaataggtaaattactcagtagaagccttagagaacccaaattgctgatgtatctttttcgaaatgcctctcattatccaggagaatgtgtgtattggaagtatcttattctttaagtctcacacttagaccggttatgtttcctacttttaaaaattgtagaactttattctacagatgtcatttgatgccttttgagaccgaccatatatgcatttatacaatcttaattcaatgttaaaagtataattagtccaaaaaaatcaactaaatggcaacaagggtttttctttttctatattattaatttttttttcctccatctaaaactttccagctgctctttgtgaagttcccagaataatgattaacattattaaaccagagactaaaaatcttggtacggactgacccatggggacacattgctataattattttaaagtaaaataataaaaggggcgtcccatagcgggcaaaagttggactcatcctcaaaatttactctatttgtcaaagtcccctaaaagagttcttaggagtggttggaattggttgtcagaaccaggtgctctcaagtgtcttgcctttgtggttcgcctacctgggtttcccagtccttggttgaacattaatgttctcaacgagatataatactgaatataactcttgtgatctcttccagtggaggctgaggccatttctaaaaattccttccctctgtttcttctacagtatcttcctctccgtgtgcatacatgtgagaggcatagttttccccaacgtacttcagataaaccttattggcatagttttcctcaaagcacttccaataaactttattcctttcatgattgtcctgtagtttacagacactgatattgtactctttggagtggagaggggttttgccattcttacaaaaaaaaaattggctattcctccatttatcaggctcattttattaacattctactgtcatcattgtgctctgtcactttgactaagcccaagaaccctcccacagagcaatgttaattataacccctctatgcccgtaaaatatgccatctaaaggctttgaataaatttgggataaatttcctgaagcagaactcatgaacccatatgtattttgattccaattcctgtcaatacaggttctagttcaactcccaacacacacacacacacacacacacacacacacacacacacacacacctctcacatgctttccttctaattggcaagaagccttcagatgtccttcacccctactggaaaggcatgaaacaaaacccagtaccttcctcctacccctaaactggttttgtcttgctgcccctaatcctagcttgctgttctgtttttctattttcccctaaatgcaacttactttaagcatgtgttaactggattaacattcctacaattgaaggatagtatatgataacccatttgtcagtctagctactttcttctcttttaaatgtctacttacgacgtacatccagactgcacgccctttttattttttcaaagcaaagccaaaaaataaagaaaacgtaaaattagtttttaaagaaaatgcacaatctgtttttaattttggctatcacgaaaaggggaattaaccagccaaaaaagcaaagcaaaaaaaacgtgtcccctgactgctctgtctgtgcctttcaagcctgtgcgtctggttgttcatctctgaaagtgtgtgaaatacttttttctttaaactttttgtttttttctcccttcttgtttgggaattaagtgctttttatattatatatatctatatatatatatcaatgtgtttcttttaattgctagatctttatcttagatttgattttatctaaaattatgagaaaaaaagttatgaattgttttctgcagtttttccccactccctctttaaatgtggaacaacttcagctgcagaatcctcacatccacatctttcaaattagcctggtctcattgccaattgcgtgcaacatgggtggcataaggaagatggatgatgtcgtttggaaaatgccatttctctatagagaagtaattagcaacccagtgcgtgggccccctgcttagtagtgcgtctcaatcacctctgtagatttctgaacctcccccactctagatggggctgtgtggctgccgatgaagttgttcaacttgaatgcataaatctagtcttcttgtttttgctttaaactttttgatcatgactactagtattttatgtattttggctatttttagtaggaaaaagtttaactgtttttattatttgaaaatctttaatgaaactgtaataatttttggagtaattgcatgttgaagaagttgcagcttagggtgtgtgagattgtcagtgttagagttctgttctttatttccatagatgggcatgtgtaggctcatttgtttttgtatattgcccatcccttccttacagccagaagctctaatgcagctagatcactccgtgccgcccttacatggacatggcgactcacttacacatttactcctatcatcttcatctcctgtgtagttcactcatagatatgaccctccccttcctgcatctttccttcccattctccccctttctttagcattgttaaaatttatgtgctgtcatccatctccctaaattaaagaaagcctaaaatttgtcaaaaagacaaaaaaatatatatatctgaaaacttataaatgcagaaattcattcaaaacccgttagagtcatagaattttttgaaaggcaaattataaaagtaaacaggtttttttgtttggtttttcaatcatagcaatcggaattattttaaattcaaaaattgatgccctcccaaaccccccaaagtaaaaatttgttaaagtgcagattttttttttctttttatgttatgtggtgtggatgtatgtgttgttgcctccctgtatcatcctctgttgtaaattattatatttgaaaaattagacattttgctcaaaagtttttaagaaatgacaacaaaaaaagcaagttacaagaatgtggcaattctatttgtccaagagcattcttacacaactttcttttgtaaatttttctttcatgccaaaaaacatgcgggcaatttgttgatgtaagttgactataaattaatatggtatgcttttttagtttaaattattttgcctatatggaaatgatttctttttttcccagaacagcttctatttttaatttgcttttactttttctttccattcttattatattgtgaatgcctcaatgttatttgctctccttctcccagcttactttggctacgaagttgattttattttctactatataattttgaagactatattttttatttcatttgtgtcgatttgctgaattttcactgttatgttttgtgctgaattgcttctaataatcaatgtgaattctactctcagtagaagggggttaatacattgttcttaccacccaaagaaagcctggcctctttgcctgaactttttcaccaccgtgtttaaagccttgaaagtattggtaggctctatttggtatcttaaaattgtttccagccagtgggaggcctgtaccctagaagaaaatgagttgagttagctccaagtagtaccagtggtatttgcatctttttaaaattccttaaaaagcatttaggaaattagttcttttccttcagcaaaggggaaataaggtactctcaagtgactatggtagagtttggttatccaggatcatactctcacttttgcttcaggctacaaaatcaattatactgaaaatgcagatatcaagaatcccaggtgtttcgagtattgttctatgatactgacgccttccagtgtatggaactaacaactggcaaaaacacagacacacacagaaggcacacacacattctctctctccctctttcctttgtctcttctccttttccctttttcatttctctcaaggatttaatcaggtaagctttcagggatcttaagattctaccaagaaaacatgatgattttcatatctaaagttatacttagaaaatatttcaggtgggtaccatcatcgtgtaactacagggtaagactattccttcaccttaagattatttgaaccaatgctgccttatgtacttcaacatacataagattggtaagaagcactatataattttttcatcaagaagttacttgttttgctttacagatatttgtgttatttgaactgttatagaaatatcaaactgaatggtggataagagtgtttccaagccagcagcttaatatttgggctctctctacctcagtttatgcgattttgtgttgtttgacatgctggataatattttaggtctaaaacttagaacttcctaaatgggatgttgttttatcttgatgcattaaaatattttctttctatgaaaaagatatccaaaggtaaatttaataaaatgttatttttaaaaaatacaagctatttgaattataaattatttcttatattctattatttaaaatagcctcaatatataattatacttctactttagcatgaagccactaaataaaaaagggttagaagaaagtgattatgtaagtgtttatagctcagatacattagtagaaataataacattagtaactagcatttctgaatagtagtaggtactgtgttaaccatctaacatataaaaaatacttgatatgcattattttaatatttgcattgatggtttgaggtagggtattttattattctcattttccagagtttaagaaatttgaccaaattcctagcactagtaggaactcctagagagttccgatgttaagagtctgagttacttcagaagcaaagctcttaataagcaaatgaaacactccacttgacatttcctgttttgtaatacataatgatatcaaggggctgtggctcatcttattgttgaaaaatataatctgtagcctttccaaatcaaacctatttcagacaaaccctttgctggggtggaagggtggtggggaagcgagggagaatgccctacctagaaattctcatcctgttaaaatacaagttaagcctctttgagacacttgagtttttctactgtcttctccccaggtacttgccctgtttgtccatgactattttttcccgaaggttgatagagagcaatttcatggttacaagctttatgatatttatgtgttacaaatacacacttctatgtcaccaaagagctaaatatctttgaaaaattaattcttggggggaaaagaattatttccccttatcatgtgaattttcaggaagaaatttggaataatgcaaataagagatgaagtaaaatacccaaatatataaaaagaattcaaggaattcaagcatggtgtcctgtcccagagtctcactgttcagcatcactgttttggtattttcgtgaactctcaaaacccaaatatctccagagaggcaagtgttgaaacttcatgcttgtttttttgttctttttttttttttttccaaagataacccactgcattcactatcacccacaacattctcacagttcagaagaattctattaaattttttatacactgtcttttttgatggcagtgagccccttttgctggatatcagccctagaggcatgaattatatatctacaaatacactcataaagcaaaaaagccgggaagccttcagggctaaaatagaccttttatatctctaatgatctctctagtttaaagaaaagcacaatcctgccaaaaaggggtatgtatgcctgattttaaaatgctaactttaaagaatatagatagcttttatcccaaactaaagaaaaattctggggatagcataggaaattaggattttgatggattacaggttttgtattactctgctcataaccctttatgactttgggttatttgcttccatgaatacttttgtaggcatgggacacatagttgatcactgacttcatgatctctgggaagtgaagaaaatattatcagctacttgaacatttctcagggtagtcacttttgattaaaataaacaagaagctttgaatagcttcccaccaaactacttttttgtttgtttgtttgctttttgagacagagtctcgctctgtcgcccaggctggagtgcagtggcgtgatctcggctcactgcaagctctgcctcccaggttcacgccattctcctgcctcagcctccccagtagctgggactacaggtgccagccactatgcctggctaatttttttgtatttttagtagagatggggtttcaccgtgttagccaggatggtttcgatctcctgacctcatgatccgcctgcctcggcctcccaaagtgctgggattacaggcgtgagccaccgtgcctggccaaactaagttatttctattaatgatcttatagtaggagaaatacatcactttctcctctcaaatgatgtgtgcctttgatcccccaggacactattatcatctgcaatcttaaacatggaatttaatattaaaattaattacaccaacatatacacttgtcccaggcatttttcatgtttacagttatctaaaatgttctacctattttcattagaattgctatttgtcataaggacccccgtgtactgcagttgacttcattttaaactaaaggcaatcttcccacttcttgagaagccaggaaagaggggttaggaaagcttctaccactttgttgtctaaaaatcagcataatttgggctcagattttcccaacagagggtatcatttatcatttttatcgctgctaccgagattaataacaaaatggcaaagaaaactagagatcagtagttctgaaagattttgttttctaaactctgagatggcatacccatcattttagttttaaaataagctcttatcatttcactttgggactcaccaggcttttagaagctctttataaattaacaagcttcagaaccctcttactgtagagttataaaaaatgtggttactcttttttttttttttttaaatctaagatacttgcattagtgtgttaaatgagagggagatagcaaagtaaagtaattcaactgcagagtgaacagtttgtagattttgaaacaacaagtacactgtggaaactttagctggtattgaaaggagaaaaaacaaaccgaaaaaacaaaaaggcaaatttaagactccggttgggtgtcacagatggtacactaaaattgcaaatgaatgccactctgtaatcatgaagatggtgatcttaatcccacttaaagggacactagcctcttacccaacagtttgcctttatattcaaactatttgtaccagggctttgcctcctaagatatcagttattccttgtcctttaacctagtttcctctttgcttactctacatggggtagatttgtcattgccataaggaacaaatgactcggtgtttgtgccagaaaagaacacacatgttaaacctgtgttacagataagttaaaaaaaaaaatcctgccttgtcctctgaaggtaagtaaaactgtgcctgagaaatccttacggaagctttagacagagtccatgggccttcacttcctctctctcatcactgctctcctattactcaaaccttgccctctttcatatatcaccttaaatctaccacttgggaccccctagcagaagaataataaaaaagtttgctcagagttagttttaggactggcttacctttagggaactgcactccaaatcccatttgtaaaaactagcaaaagtgtgtaaattatgcattaaataagttgtaaggcatatgaattatatatgttcacaatgtaaaaaaaagaaaaaaaaaaaaaacaggtgtctgctggtctagtacagtaagtgtgaatctttggcaaatctgcacagatcattttgctcaatagtttcaaactctgagcaccagaatagaggcttaggtttagagcacatactacaagatcatcttgagaatctcaaaaaggtatttttttaaatttcatagtaaaattatcacataggccagagatgacactgcaacattctgttgtcccttcccttctaaatggtacacattatatgctttctcggttccctcagaaactcagtttctttctgcagaacacaattgttattggctaaacagggagagaataaaggcttctgacatgggcaccaacagtttctcagtgcttgaaggtaggtattagctttcttctcaggaagcccttctcttagcacacctgaaacctggacaatttggatgcatgggaaaggtttcaggatgcaaggtgtggaaaggttgcatcttgaagcatttcctatgcattcaaaaggagagttttaatttgtgaatcaatcttcataggaaaaaccctggaagactgtgtaggctccaaggcttattcacttggagtcccctagaactctggtactgaatcacctccttgtctggctttgttactgatgaggtgggtacctcagctacagtcttatctgttaacagctactcaaacactgattatactatcacagcaaagttattaccaagtgtaagagacacacgtacgtggtaccagttgacagctcaatgggtcagctcagaaagaggccttcaacaataacgtcacattagtacctcaaccttctaaataactggggcagggaaacattcgcagcatccctgcgagtggattttttttaagtgatagtgggaatacatttttctggaatatattcaataaagagacatggactatgacttcttaagattcttcctttgcttggaaaacaacattataaagacactgaagagagatcagttatcctgctgacatagatgcatagcaatcttggccttacagtagggtaagcaaccactactgcagaatatttgtggtacccatgatctgcaaggccctgttatttaatgaactattctgagctttctttcccaacttagtctgtatgattctaagtgcaataacgagggtctatgggtaaacagatatgtttttgccacactagttagcaatcaccaatttaaaaaactcactttgctaagtcaacatttctgagtctaacagtttcaagtcatggatatctaggctgagtattttgaaaatctagcttccagctcagcatatattgcatacagcatgaaagcaatgcatacaaatattagactaatgcaaggcaagctgtcatttaatagtcagggggatttctggaaaagcatggtcaaaatggatttgttagatgaatatttttaactttttaaaaatccctattgctcagcttatagtaaacaaggactgtgattaataagtgtgaaataaaaggaagtaacttaagaaaacacaaaagacacaatcttttatgtttcttgatcttggtctcaataagatggtgaatcggtcattctcatcctcctgggagcaaatgagcagaatcccaagaaggcaataaagaaatcttaaacgcatgttaataaattcttaagttaagcacacaatgtgtgcgtgtacccacacatgccaattttgatagccagccagtatttataacagtatcattgactgaatgtcatcagcccataagcagatcctggaaagaacatatatagttgaattttatctaaataattacttgagagtatctttaaaaaatctaagcccctgatctagggatttcaggtttgggtggcaagaggcatacagaaggctccaaatctgcctagaatgattagactccatccagaaaagatccagatctttttattataatttctgaggcataatctgtgaatgacgttggttgagtgagagttgtttacaaatatactaattgtttttctttttcttttccatcccaggaggtgaattagttatccctcttcttgtagaagaccctttagctacccctcctattgctactcgtgcaccttccattacactcccccctacctttcgccccctcctcaccattattgagaccaccaaagattccctgtccatgacctctgaggcggggttaccttgcttgtcggaccaaggcagcgatggttgtgatgatgatggcttggtgatatctgggtatggctcaggggaaacctttgactctaacctgccccctactgatgatgaagatttttacaccaccttctccttggtaacagataagagtctttccacttcaatcttcgaaggtggctacaaagcacatgcgcccaagtgggaatccaaggactttagacctaacaaagtctccgaaactagtaggactactaccacatctttatcccctgagctgatccgcttcacagcttcctcctcgtctgggatggtgcccaaattgccagctggcaaaatgaataaccgtgatctcaaaccccagcctgatatagtcttgcttccgttgcccactgcctatgagctagacagcaccaaactgaagagcccactaattacttcccccatgttccgtaatgtgcccacagcaaaccccacggagccgggaatcagacgggttccgggggcctcagaggtgatccgggagtcgagcagcacaacagggatggtcgtcggcattgtggctgctgccgccctctgcatcttgatcctcctgtacgccatgtacaagtacaggaacagggacgaggggtcctatcaagtggacgagacgcggaactacatcagcaactccgcccagagcaacggcacgctcatgaaggagaagcagcagagctcgaagagcggccacaagaaacagaaaaacaaggacagggagtattacgtgtaaacatgcgaacactgctcacacgcgagttttcacagttatttctatccacgcctatgaatctttggacggtgagatctcacagatgtcagaactgctggaactatgaaatggggtatataaccacgactctggtggggaaaaccgttttttaaaggacacacacacacacagcgatgcatctctctctaaagctcagccacggctgcggcaaggtcccagcggtcgctgggagacagaaggttttgtgccctgctgtatcataaagcacacacttagcgctctggagccggacggtggctccaccacttccgcaggcctggaaacttccttctccggaggaccttttactaaaaggtagaagacttcatggcttacttgttccataactccaagtgagtctgtaatgtttgtgaagcttgactgtaaccatgttttttctgtttaattatgtaaaaaacaaaactacaacaacaaaaaaagaaaaaagttaaaaaagaaaaaaacaccaaaaaacaaaaacaaacaaaaaaaaaaacccacaacccttatctggttctgaccagtgtgcgtgtaactttatgatctgaggggaaaaatggcttttgggtttttgtttatttttttgataatgactggacatcagaagaggaaaaaaactcaaaacaaaagcgagagagactattgccatatgaactcaaaagctatcatggtgttcactctacatatcaggttatggtgtctctagaatctgttgtttgtttcctataagatgctttgctgaacacatagcaaaattcatgtgacggatgataaattgattcgaaaagctggtcccccaggatctaatttcagaatttaccacccaaacccggaacagatgggtttagggctggtgttatcagagctattggctttacgtaacaatattgttcctgtccattcacccagccaaattgtgttaaagaggaaagccccacaaactaaaacagcctttcctagggaagaggaaggggaggtgggctggatctgtgactgattgaaatgcatgcaaataaaaaagacaatattaaagtctgttatcaaaccagacagtaggggagttcaactcgtgatggaaccacaaaaggtcacacaagccaaccatgtcatgccagagtacaaaacacatagttctttccccgccccgaatgtgacaatggttttcatagtggtttaattttgtagcctgacatttatggataactctgtccttccatttgctcacttctctcttcacccatcttttttaaaaacaaataaatgaataaagctgctgtgacacacacacaaaaggaatttaatagtataatatatatataaataaatatatatacagatatatttatcatggtatgtttgatgggatgactgacacaggaaatctgttaaagtcttaaaatggaatgagaatgttgttttaaaagaaaatagcaaaacaacaaaaaagcaaaccttaaaatgtgaagaaagtgtgaattttagttttgtcacagttaactgtgtcaaagagaattaaaaaaaaaaacttcagattttgtttacatattttactacatttttgctggtataattccttagccacctatgtacatactgctttaagaaatgtttttttcctgtttatttctgtttggtttatattctggttgtctttttctttttgtaaagaggaaacaatgtacagaaaaacaataaactggttgtatggccatagctatccgaaaagcaagagacaaagcaagacaaatattcacacaaaaatgaagtgtgtcctctggagggtcagatatacaatttcttttgtacagatgaaaatcaatcagctgcttagatttagaaatctactcttgctggtctttgtaagttgcatgaatatttgactttgaaaaaatatcttaacgacatggggcaaaaagtgcaatctaaatggtagcctttactaatgtgtgtggaaagaggtgttcctcattatctaatatttcaatgtgttaagagtttaatttttttgttatcattaaaaaagacaggattataaagagatatcaaagcacgattttagataacctaaacggcccagcctatacgaagttgattatatctcgatgtctgtaaaagattgctgttcttggagtcttgaggtcttgtgaattgatttcctgctttctttcatttttttcaatttaagtaataatacatttgttatattcctttcagtgtaagtttctatttggacaattttatgggaacatgtgcattctctatgtgagcttctatcatattcctgttttattagcagaacctaaaggaatttatttaatgatgttgtgacattactgctttttcttttttcttttcttagttcatatttgcattttcgttcaaggatatgcttagcaataaaatgttcttcccaaaaccttgtatgctgatgcacttttattttcttaacatttgagaaaatctcgcactgaagctaattatgtcatatcttattaaaagccgagtaagagctagaccactttcatgtgatagaagatattctaagcagttactaattattacattatcaaaatgccatatttatgagataattatctgttacttgaggcattattttttagattgctatgatagaataaccaggagggagtgcatttttctggaaagatgatagaaacattgtattctagaaaagattattggatactatggttttgtttgtttgtttttgttttttgtttttcgttttttgtttgttttttttttgagacagagtctcgctctgtcgcccgggctggagtgcagtggcacgatctcggctcactgcaagctccgcctcccgggttcacaccattctcctgcctcagccccccgagtaggtgggactacaggtgcccgccaccacgcccggctaattttttgtatttttcgtagagacggggtttcaccgtgttagccgggatggtctcgatctcctgacctcgtaatccacccgcctcggcctcccaaagtgctgggattacaggcgtgagccaccgcgcccggcttggatactatgttttttaaaggcatttcgtaccttttacgtattttctataagtcaacaagctttaaacagtatttaaaactatgttcacatagtgccataagcactagaaagtcttagatgtcttctttccaagcctcccaccatattaaaatttaaaattaaaaaacagaatccaaaaccaaaatttaaatgagttcttcaattttaacagcttcttacaagaatttctgattacaacttgtttcatacacccattgtagcagtaatgtctcatatttctcgttctctcagcacacacttacttggccaattggataatccatctaccctttgttcttcactgtaatctagaaatatagatttaactgaacagctgtcctttatccatatgttggttaccagttttcaaagagttagaattttaaaaatatatatttagttaagcctgtgccttcaagataacattagtggagtggttatactatcgactatgttaggaatgggggggagaaagtcaggttcagtgatgtcaaattatgtaaagttttttttttgttcctgtcttcaaagttctgtattagatgttctcccatcattttttgagatggagtcttgcagcctacagtgcagtggcatgatattggctcactgcaacctctgcctctcaacctcaaacgattctcctgcctcagcctcctgagtagctgcgactacaggcatgggccaccacacccagctcattttttaatttattttttatttttttagtaaggaagggtttcaccatgttggcaaggctggtctcgaactccttacttcaagtgatccacccaccttggccttgcaaaatgctgggattataggtgtgagccactcctcctgaaatctttctaaatctcactaatatataattctaggactactttaagcattcactttttctttaattcaagaaacatttattgaacacttatgtacaagctagtctactattggctattgttactttgtttcaatgaaggcagaaaatggctagaaggattttaagcctttttgtctcttgtataaatctatacaggtccagtctctctttgctcatattcaaattgaagtttgatctttctccaaaaaatatccaagccctgtgtttgtcccagttgaactaatatcttgattatatagtttaagatcagtttgataatgtctattgaatatttactaaatgattatgggatattaaattgagagccttgggagcttatcatctagtaaagatgaacaaaaaatggtactatagtgaatgcaaataagctatcaaaaagtacaaactaagttgggagcttagaagaaattatgtaagggaaggcttcatagaaggggtgacattttggtaaaccttggaaaactgataggcagaaataagggctgtatatcattctaagcaaacccttaaagtgggagcaagcaggatcaaaaccataatttggattgatgacagactgcaaaaagtacattggaggaagatatgagtaggaaggtttttgaaatcatgtcaatgaatgggaagagagaaatgggagaatagcttgagaagttcaaggtcaagggctgctttgtcgagtacaaaggactcgagcatatttgaaatgaaaggtaataactgatctactcttatggagcaaccgagtttcctgatagagatgtttatctgggggaaaaaggcataagtcaatcttcttggagagaatgggatcagaaactgacatattgctacagaggttacaaaagctgtagtcagagggcttcagtgttctggatatattaaaggacaaggtcagatacccaagtgggaccgtgagtgattaatggcagcagtccactgacagcaccagtaggaaggcgctaatgaaaagatctctaaatatcagtaaggggttagctgccattaataatacaactttatagctttactattttttcttttattgttgaaatagtgagggcacgtatttttctaattgtgtttattacaaagaaaacagacccgaagaacttaaatgacttctccaaggtcacacagctaatacatgacaatgtcatgacttaaaatccagtcttgtggttccaaatttagagctctttcataaacctgtctctagagaagcaagtcattttctactttttccagaagcatttgaagtggaagctaaggcaggaaatgagaggatattgtgttagtctactgggattaccctggcaaaataccacaggctgggtagacaactgaaatgtatttctcagttccagaaacaaagttgcagatcaaagtttgttagggctcagtttctgggaagggctctcttcctggcttgtagataataagctaccttctcactatgtactcacagggcctttcttctgttcatgcactgagagatttctttttcttgctcttcttataagaccaccagtgctattggttaaagccctgccattatgactttgtttgaccttaattacttcctaaagacactacctcccaatacagtcatgtttggggttgggacttcaacatatgaatgttggaggggatatggttctgtttctagcaaatgtatagtagtgggaattgcaaaggttgaagttccaaagtatcaagggaatcagaattgggaagcaattctaacctttttgaagtggttacatggcccaagtagaagagcaaataattccaagagacaccaagccacagagcaggtaggatcacgtgagtagggcccaggatagaagagcagtgttagggttgcatgagagtgagggcatataagacaacaacagctaaaagcaatgcatgctcagatcttgggagatgtattaaatgagtagagtgaatttcaagatatctgagttttttttttttaatgattacatgggttctagagtcaaaatgccatggctcatctggtactgtaacttaagataaactgcttagctaaggctcagctttcatacctataattttgttatacttatcttgcaggtttcttgagaaatattggatgaaataattcatgtgaaatgcttaacatatgtgtgacaaataattatccttaaataaatgttggtcgttattacaattggctttgttacttgattcaggcaggatcaaaattagctgctatatgcatgactaaccaggaccaaaaagttaataaaaatacgaaagtttggcactcttagtttttctctaattctttcatttgccaagacaatataaaatttagttgctagctcattagcaaagattttccttcatcagcactagttatttgtttccagctaccagcttcagttaggcccagggaagccctgcatcccgagaatgtcactccttttctgagtttccatccttcagctttcttgtggcccttggtcagccaaatacctcaggcaaccttgcacccctttattgatatgcattattttgtttttaactttttattgtgaacgttttacaaatataccccaaagagaatggcgcaacaaacccccatttatccatcacttggtttcaagatcaatattttgttacccttgttttatctgtgcccacctccctatgaaagaatatcttgtaatattacacaaagttataaaacaaaaagcattcaaagagttgctgctgggcctctcgacctgagtcttatttagtgtttcagtgtacctaagcctaacgttctttctgatggacaattaatggcatgattctagttctttattcagtgacaacctaaaagagattagctgctaagtagactcttcatcatttaatgagattgcctgaaaaagtgaaagatgtttcagcttgtacgtatttcaattcaactgtgctcaatcaccttttaaaatgaataaaaagcggtctatagattatatattgctgctatatcttttgtaaaatgtgccattgtggaagagaatctgtactctttcaagagagtaagtaaaaggggagacttctaatttgtacatgtgaaagctaagaaatacctttacctctaaaaacatgatcacagatctactagcatattttaagagggttatattcatgtattttcaatagctgtaactatactgaatttacatgagtctacacagaagagatatccttaagcacattttcaagttatgattttttactgctccattgtcttttgacaatgattttcttctttgttctcactcacttgccatttttgacctagaattttcactataaaaatatcatgagagagagactcagagacacagagttatagactatttgatagtacattcttttctaccataaagtcaaggtaagtgttaggatgaatggacagaaccactataaacttttgcttcttcatttcatggagccaaatggaacatagaataattagtttcaacaagttaatgatttttctgttcctactctgcatttggtagtttgatattttatttattttggaaatttagcagagcatatataaacattcttaaggcaggtcctttaggtttgcaaaagagtacagtagacaggctgatgggtgggggtcagaaagtagataaaaacagaggcatcattaaaactgaatagctaaaacttccttggcattacagtatagttttcaatgttcatataccacgcaggaaaatgtacttatatgcatgtatgggtatgagtaaccagatctgg

SEQ ID NO: 411 - DNA, 969345 bp, Homo sapiens
  source 1..969345: mol_type = genomic DNA
aaggtaaatcgtacgtcttagacatgtgcaaaatggcagtgatgttttcatttcacctctgtacactaaaatacaaacagacaatgagtacttttcttctatgcagtttgaaaatacatgaacatttttatggggttacaaggaagtataataattagcggtggagttctagaagaatatttttaaaatgtgtgtcaaggcatagtaggggtatgaatgtgtcagaattagctaaggaaggttctgtgagaaactacattttctttttcttttcttttttttttttttttttcttgagacaggggctggctctgtcacccagactggattgtagtggcgccatcttggcttactgtgatctccgcctcccaggctcaagcaattctcctgcctcagccacccaagtggctggaaccacgggtgcgcaccaccaaacccagatatttttaaggaattttttagtagagatagggtttcaccatgttgcccaggctggtctcgaattcctgagctcaggctactggccttccttggcctcccaaagttgtgggattacaggcgtgagccacagtgcccagccaggagctacattttctagattttttgttcacatcctctaacttgcttctcataaggggaagccaaagattagaataaacttccaggccctagaattagacctcttaagaaatcatttatgtccattagattatttctgttcggtttttattctttcctatcaccaaggaggttaatgtcttcaactgtctgaggaactacacaaagtttacactcagaaagcccctccgcatgtctaccctgaatctttctcgctgcagtttaaatcacagatgcttctatgattgctttagtggatgtggattgaccaagtcatggggaataaactcctgctttgttttcttttgaagaaggttctccatcttcagactatagagcttcttctcaaataccaggtactttgtacctttccattgtatcatatacacatggatgaatttaggaaattgacttctaaaaagtgaatgaaaaagaggagtaacatagatgttctgaaacagaagtgacaggaggagaaaatagaaagttatttactattttcaaagcaactaagtagaaaggttgatgaaagagagaaaaaaaagctgtcactgaatgatatttccattggaggggaaaataggtaccaacaaatgaaaattgcctcatctttacaagtttcactgagcatgaaaatgtccctttaaaatttcccataagccatggctggctatgggatttttccagtgcaaagggaatctgagttcaggaggccagggaatgccagggggaaagggattttctgatactcagaagactcagagactgtcagtttaaaaaatgaaagtaatatagaaggggcaaagtggcatttatcattctatctctccaggctcctgtctctttaatcagctagcctgatttgcccagtaaatgattcctgagagtgtgtgtgcgtgtgtgtgtgtgtgtgtgcccgcgcgcgtgtgttgtagctctgtcaatccttggattagaaccaatgattgcagcttgtaggagggctgtccagggccagattgtacaatgtgtctcagtgccagagtatgagtggagataattacggagaagtcatactctctcacaccctcggctttcttgttgtgtccttcagcaaaacagtggatttaaatctccttgcacaagcttgagagcaacacaatctatcaggaaagaaagaaagaaaaaaaccgaacctgacaaaaaagaagaaaaagaagaagaaaaaaaatcatgaaaaccatccagccaaaaatgcacaattctatctcttgggcaatcttcacggggctggctgctctgtgtctcttccaaggtaagagcttgctattgatttgccttcggtagacccaggaattgtacagtgtgctttataagatttgcagactccccgagtcggctgtgctgcgctgtttgcaggtggaggagagagcgtttagacagcatggctgggacttcattctcccgactaggctgtgagaatattgatttgattctggctgctaccggaatgggggaatatgtatgtgcataagtaaaatgtgtttggtgctcctgttaggactgtgcttgtgtgcaaggctccctggcttcatgcacattcttgcacacatacacaacggagcacacatgtaagcagggggaaatgacagattcggagggcaacagggttgctaatgtgttgcttatgcgactgggaagaaattacaagaggaaactttaaatatcggccagcgaacttgcaaagcttttaaaaggagcaaaggggaaaatgcaggctagaaagaatcaggtgcttcctgtgaggttctggtcagcgatccagctgcaagggatgagtcaatttgcagcagtgggggacaactgtattagttttaaatgtgttcgggggtgtgtttgtggctggggtcggaggtgtggaagcgaggggagccggggctctgaaattctaaaaagcttttcgaagttgaagggagagaggcaataagagtcgaatgctaattttctgtttatttatcggctgagccgggagccctgggggctgcagttgagtgcaagctttgatgtccccagtgctgtgttctgtgcatttggaatcggcctccaccttgagtccatttgctgcaccgtgcctccccacaccccatcccggctctcacgtctgttcgttccagcaacagaattatccactaatcttcttgctcccacctgccctgtcctttggggtaactagtttgcctcttttatattaaacacagctaaaactcgtaaggatcgagacaagctgagaaactttcccagggtggcccagcagggctccgggaggaggagccctctcttgggaggtgaggctcagtcctatgcagttgtattcccagaggaaagttccctctgacccggtgaaaaacgatggggagtcccaccccctcgccctcttctccccctgcaatatggagttctcctgatctggactgagtcctgagctgtagtcctgctggctcttctccgaggttaggatttagggattgctgctgtcctcttgacataggttgcagtggctgcagtgtggatccacgtaaggtgggcagagagaccaggctggaaggatcaaatgtgtacacccttgactggggctcgatgaagaaggcaaggggtggggacaggagggatctgtgtcgggtgataaggaagtccaaggtggtgaatcttgcagggatgtccatgatgtcgtctgctgcacccaaccccaggaggcatgggcctcaggattccctgctgtcccctaggggctttggtgggtgtttgagtgaagggaatcaacttggaggcatcctcgattgactcctcttatataatatgaagcagtatcagtgtgtgtgtgtgtgcgtgcgtgtgtgtgcacccctgcttgttctgggtgcacaagaatgaagtggggaagctgagttcaggatcgggcagtttcggaaaagcagtttctgtgggggttgacagcaaaaatgaaaactaagcaggcaaggggtagggtgaggggtcagaggtagggagagggaaggtcccaagccctcagtcatttctatctgtcccgagatccatgtctcttctgcctgtaacatcaaactggagacaatgaccaaacttccaccatcaacagccctgctggctgcatgccaggagccccagggccatactgaatttacatataaattagcatacgtgattttttttttcatcagaataaatgcagggaagcataatatttgctcatactttgaatcatctctgaatagatgagtagcaaagtggtggtgccaatttctctaaggtgccatctgactttgtggtcttgttcctaacttggggtaggggtggtggcgacagcactatctcagaccttatcacattctaccgaatccggaatttctcaaaaagaatgatggccttatttgtgctaccctcacccagtcagccctgaacaggcttcagtggtcgtaatagaacaaggttgcccaattttaacgcagaacgacccccaaagacccgcatattgcatgccagtcagatgtggcaaaggtgatgtctgttttctctttcagaggaaggaagctgaagtctgccagctatctcttatcaaacttgcagaattactgaggcagcccaggtcttgcctgcaataatccacccctattgcattgacccagtgggactagttagaatgcagcacacattccaaggcgattttttcttctcctctgtttttgttttaagctggttcttcctagagctgctgcttcctgtgcctcctgcctcttgaaaaggtgtctggtgctaatggcaggttaggaacccctccctgacctgctcctccccacaacccaaccagcaaccaagatccagcttaggtagggaggggggtttctgagggaatcagcactgattagtgacgctgacaggaggggggattagctccctggggctctggccctaagatacaccagggttgattaagtggaggcatctcgttgccgggagcagacgctacagaactggatcaggcgctgtcccttgcagaacacccaccgcccaccttctgccactgagagcctctgaaaggaatggctgcttgtgctgcagcttcctctttctagaaaaccgaccatttctccttcgaaggattattgtttcttttaacaccttcagatttgcttggctaggttcctctcttacctttctcatttcctcacctctcctcacatcccgcatccgcttagcagctagcctgagacacagacagggcagaggagaaggaaaaggtgcctcggcaaagttcacactccccttcgcgcagcacccgggaggtgggcggtgggcgccgttcggctgggcaggccggccaggttcctgccatgcacagtacacacgtggtgccagcagcagcttgagctgggcaatgcttctgatattcaggggtggcagacgagaccatagcaatatctactggcaaagtggaaacatcagcctgggatgatgggaccctgggcctgacataggcattgtgggctcttggaagcatggcagtaaggggagggcgtcagggagcctcatcgaatggaacctgcctgccaggcttggggctgccaacttgaggcaagttcctggcaaggcgtgcacagtggcacaaatgtagctcacctccgccctttgtattaggaggccaccccaccaatggggatggccgtctgagcattcgctcaagcgtgcctggagagtgtctgccctggccggcaggtctcgctgcatgaagaccattcttgaaactgcagctttagttaccaggcacagagcctggtcctggtcctgattcttcccttttttggttcccttaaagccaaatataagcccccagatctcgtcttatcagctgcaatgtacagtccctgacttctgttctttctcagtaacctccttccatagcgctggttttaattcaggcgtcctgcgtagtgtcttcaggtgtgtctcttggttccctgcctgaggtgatagggtctagattgcctcctggcagttccctgggttctgctctctgcctgcgtactgtctgccaggctgatagtggctccttttcttgatgggccaaacaacctggtgttgattttagccaaaacttgtcccttgggatgaagtgagctctctcaacatcccaagaaatggcagaatttctgaatcaatatggggcacatgattctgacgtgtacagaaaacacatgctggagagatttgtaatgctcttgccattcaatcatagtagaggcacactttgggtaggatgaacaggtctgtgatttggcttttttcctagtattttggattcaagctcatgatctgcttctgctcacaaactagaatgctaaagattaacaaacaaacaaacaaaaaacccacattgctctctctcttgctgcagcagagatcctacaaatgcttcacacacccaatatgcgtggtctccaggtttcaagccatttctagtggtctgaacatagctccatgggggacatgtacatctaagctcaaatttctctgttttctgtagggaaaaatctctccctctgcgggcctatctccccacctgcccaccaggccggggagcgactcccctgggtgttgtaaggactcattaatgcttgtaacactccaaacatgtggtgctaagtggaactccatgctgagattatatttatgcagtttacttcctttctgctctattgtcttgttacatgtttactttatgtctatagtcatttgaaattcaataaaaccaattaaacataaaaaaagaaagcatgcagtaataaagaagtcgatggcatacagtttggaagggtcaaagggtaccatcctagtgttcctagaagcatcacctccccattgccggagggtgcttcatcttatcagagagtgcactggggaagggcagaagggctttagaaggcacttgcagggagcatgcctcccatccctttgcaaaaggaggcttcagtgtgggactgcagcgtgaatggtggagagggggagcactagggaggatggagctggaggtaggagtttcagaaaaaatagctctaatctggattggcaaagggtgggaaaaaaagagctctggcttctgctttgactgattttggtcggtaacctctgagaactttattttttctttcatgtatgtatgtatgtatgtctttatttatgcaaccctctggattaagcctgctcttgctaccactgcttaaactgaaaagatataggactgcatccattttccttcccattctctctccctccttccctccttctctccttctgcccactccccctacttctctgttcttcaccttctctttttctctttccctttttctgttttcctttcatttttccttctcctctatgggaaaaataattgatcagttgacagatctaggtcaagctggcaggggttgctctgcttcatgcaggcttgcctaggagaaggaggggagagcctgtcttcacagttcacaaggagcccagctgatgggatggaagcggggagggaggccaacggaccatgggcgagttcagccctccccaaaaggttctctgggatcctattaattacagagtcttccattatttggtatctctcacactctaattttccatatcaaatttatctttgcctatttcctgctttttttctcagcttctataagctgtctgtttcggtttttcttgttcttctttctacttgcccctcctttctcttctccttttctactgcttctaaaatcatgacaggagatcacagaatctcccctacttaagtcatattagagaaatggccttttgtttatttgcaagtggagaaacagaaaccctgccagaagagctctgtaagtcatttgcaaactgcaaaacaaaccaacaaagattcacattttcattgcggagaagagcgtatttcaagagagactgtcaagctaagaaatcaaatattggaaaacacattcttcagctctgttactaaggacatcttaggttactaaatttgatttttttttttttttttagcttcagtgagagtattgccctttgcgataagaaaagactgatcaaaagactgctggttttggctttacttcctcattcaaattcactcgctagtggtgcttcctttgctcatcttggaagcgccaccaaactctcaccctaacaccaaatccatctggttgtttatttgcccacgggttcaatcacatccaagtgtttattgagtgtctactacgttcggtgcactgttttaggtgctggagataaaacagcgatgaaaaagcaactaacggataagaccaaagacctagttgggtctctcagatttggtttggcttggcatcctttgtcataaacggaaagcaacaacagcagtaccggaagcaagggtggagacttcatggcacagcctctggcctcctgtgcaaatgatgatggatggcagggaagtaaccagccctcaatccttgttttgagacaggggtttgggaagaggaggtgcacaccctggctctgggttctcataacacagagatgctgcctttgctactccacacaacctcttgtagaaaaggagctcatggatgcctttggtgtatataggatggggaatgctgctgtgagttcactgtctttgtggtcattgtcttgtgtgtttgagttactggttgatgctgaacatcactgtcacctctctggcctctccacttcctttatgccctgacttctgcacagaactggagggccaagaagataaaaggagaataccagataaggccagggaagaatttgcctcagacagcttttgtggatgaggcaaatactattcttctgacctgtgggagggattcagaattcagggtagagctaagataacctcctctatgagaacccttttaatttgctatccaatcatcacatcttaatttagagttcctggaataatacaaatgcattattaacaaaaggaatttctttgttttcttctgatggaatacagtgttttgggcgtcacattgtgtagttgttctcctacacacccatcttctttcaatccatggattgtgtttgcagcactgtgtgtacagaggtaacaaagctgctctggcactcacactgtgtactctagctgcaccctgaatgctttgggagggctgctgctatctgcatttccatcacggtggtggtgatcatgcctaggttttctcatgaacaagaacaggtaattacctttctcataaacccatgattcttccaagtccagtggtctagaccaattatacattgcccaacttgatctcagaagtcagaatgatcctcagtgggtaggtgcaatctgcatttatttgcaatactctgtctgaaagccagtggtttgcaaacttgccataccatagaatcacctgggaaactttataaaaataccaatgtctggaccctatcacagaccaattaaatcagaatccctttgaatgggaccctacactgatatttttaagagctctccaagaaggcctaatctgcagtcaggttgaaaagtgtacctctaaagccatctgaacatgttcaaagaccttgggtaagacacatcccctatataggcttcagttttctcactctaaaataaaacacttggactaagagattttcaagtctcattccaagttcaacatttggcaatactgcaaatagtctttttgagtatagttattgataggtagtggttctaaaagaaaatactcagcaccagcctctgcctgcaggaaggtaagaatataaacagcatcacagacgaatgaacagagtcagaacatgtaaatggtgtgtgtgcgtgcaaactctacgtgctatctcatatatatgatgttgtgtattcatatatgcatgcatttatttacctataaagcatccttagaatggaaggaaaggattaacttgtcatgggtagggggaatagaactgataatgactctcaattgatcaattcctaagccttcctgcaagagaaattcagaaggcatttgattgagggtcaaaaaggaatgtgattgagctggattggagagtgctcagcaatgacaagccttagaagaagctccatccttagatgtgagaattacatatttctcttctacctagcctccctgcccctccccaggaatcagttatccagctgcattgcttccactgctccctccttctcatggtcaataaagactcatgctcagaacctcaatgacaattttgcagcttcatatgttaggtagaagtgatgctggctccactcacatggccaggacagctcctgtggtgtatgccggagtgaaaacttgtttgttttctgatggagtcagcagatctaagaggcacattagaacagggctactggcagatttgtgccaagtttagtctctgggtaacccacacacccacctggctccccagagtgttcatactgctgtgccagacaacccctgattcacaaccagctcaggctgggagggaggctcagagggactttcaagatactttatttcagttcctcttttgggctctgacccctcaacaatgcagctgcagtggtcctccagcctctatctccagtgataggaacttgcatctcttcagaagtccattgcatctgtcagatttcaggaagacaggaggatgggaagaagaggcaggggaagaggaaggagaaggagattctgccttcttatagaatccagccacatgtcctatatctggagagtgattataacgtagcggctcctaacacagcggctccaggaccagattgccttgagccaaacctgggtctgcctctttctggtttgaggtctgtggcaattgaatcaacctctgtacaactcagctcctcttcaataagatagagataattataggacttaccttgtaaggttattataaggaataaataagttaatgcaaataaagtgtttgaatactgccttgtacataggaagctctcaataaatattacctaattctactacccacaggactggtctagtttttctacatgactgttttcaaatatttgaaactgtgatttcctccctttctcccctggatctcctctttactaggttaaatattccaaggtttgcctcctattttctataaaatcatccattaacagagtgctggtggttcttctctagagttgttctgcttcctctgcatccttcttccagtcttctcccagtatgtcctggtagcccagcatattagagcccagcatattatagcttctcctgattccaaatccaagtagaatgaagtctcagctctctgccaaggcatgtgaaatcctaagggtctgtcctcagtttgcctctctcctaaactgaggcactccctgctccatggcctctttggggtttcctgttgctccctctgtaaagcacacgagcatgctgttcctttggcttatgctcaggccctaccctgcccctctctacctagaaaatgcttttgatattttcagactgaattcaaagttcagtaccctttcctttgagtcttttttttttttttttttgagatggagtctcctgcctaggcttcagatgcaatggtgccatctcagctcacctcaacctccgcctcccgggttcaagcgattctcctgcttcagcctccaaagtagctgggattacaggcatgtgccaccatgcccagctaattttttttctatttttactagagatgggatttctccatgttggtcaggctggtcttgaactcctgacatcaggtgatccgcccgcctcagcctctcaaagtgctgggattacaggcgtgagctaccgtgcccaactgagtcttcttactgcttctcttatgcttgccttgcactttttcttacctttactgttcatatccacaacctgttagtgtaggtgacctatttacatgtctatctccccttcccaggctgtgggctccagaagggccaggacaatcttatttatctttatatacctagtacacatagcacagcccctgggacaaatgtgacactcagtgtttatggatgaaaggaagggaggaagacctgagatcccactaggtatttcagctgccctgtaactctgtcgactcaaggtgagctattgttcattcaactcttccttatcgtttgcctgagttgtttcaataggtatgcaagagcctgacctcagaacttaccctttctattataaagccattttcttagattcaactcatctcttctttctgacaaatattttttttagatcctaaatcttttttcccgtatattagtaatccctcctggctgtaatcaataataaaccggatgttatggatacctatgtagtagtacttgtggagctcagtatttcaggctaaactgacccaagagtggaaaagtcattctaatggtgaactgctcagatcagtaggggaagggggaagaacctacgctctacatctaggtgaggtgctggcatcagagggaagaatggggacagggaaggttgaacctaagaaaagaggaaaatgactggatgaattcatctagttggagaaggtgaagtggtccagtgttttttagctgtttctccaaatctagtctctcttccacaaagctgtccactagagtacttgactttcttcctgaacagtcaagaggaaactcagcccagtcatggaatggattaatcaacagctttttttctcaatgcaactggtgatacacgaatatttatagttggataaaccattttgctaattctgaagacaaataagaattaactaatcattctacatttcctcttccttttccatgaaaacttcctaataaaaggatctaaatgccatattgtcattttttttccgttattttttcatactgctaactccttgtccaaggtcaaataatttaataattaaatccagaagctttttcatggactcctagagttgtgagataccgtggcatttcacttgccctgtctcctccccaaggcaacaatgccatctgaactgtgttgattaattcctgctcaagaactccagagatttctagtgaccagacactcactacctgagttgtggctctcagttctggctgcctatcagaatcacctctggagattgttataaagcagatgcccaggtctgactctcaaaaattctcctggcacaggtcagaatagggcaagttcatctctattccaaaagaacagcagatgattctattgggaggtacagctaagcataactgatgttaacactctttttcatagctgataaactatgtgagaaagcactttgcaattctggcaggcattcttgatgcctcctcaatatcaattctatcctttctcttttgaaatagtactctaaattttttcatagtaagaatatgcccatttaaaatactcaacttccagattctgttatgacatatggtcatatactgcggttcaggccaatgggatacaagcataagatgactgggtacagtgtggagggttgtacttggatggcctgtgcttttcggactttattattttcccttcttgactgggagactgggatccttcctggaggtgcaggatcccacttacaaacaggaggacaaagaacacatatcaagaatgacagagaaggatgcttgtaggtcaaaccacatggacttgctgtttgggtaaataaaaaaataattgagtataggtaatttcatatatctcaaactgatagggggaactcaggttcaagatgacatagcagttgtaccagctctagaatgcatagttataaagttatcatcacttgtgaaaaaaaaaatctccatttaattagttttcttttccttgcagctgaatacaatcctaatgaatctatgtggaacaaaactttgcccctccctaagttttgcctttagagctatcaggatagaagtaaaagtgtatgatccactttctaagagatgactatcatagaccctacttatcttatcgtggcatccttcgttctttcttgtgatcatcgcatggcacagtttctggagcactaatcatcctgatcattatctttgaaacatgaccagtttgataatgatcaactgaaaaggttttgccagagcagactctgccagctgtagtctgactggcaaagtagaaagtgaactgttacttagcagattttggactttatagttacataggttcattcaattattgtgttagtttcattctttttttttggatatgccacatccttggctcattttgaggctgtatttgttcctctcacaaaataactgattccataagaccttgcctatccttgctcacaggtgatcttctctaaatgatctttttaaacacttaaaactttattgcccctgtgtccattgtttaaatccattgagattatttttcgatcccgatgagatgtcttcatcagctttttgttatctccaaatgatacagacatgacatctccacatcattgaatctaatgataaaagaacaacataatcgatctgaaagcatggccaggtgcttacttacatttatatttcatccacttcagaattatttgttcagaccatactaggtattaggcatacacaacaacaaggcaggcatagttcctgcactcagttagatagacaagtgactaccacgtggtaagtgctagaataaaagcaggtaagtttgctatggcagcatttgggagacttttcaggacaggaaagttctctggaaggaagatatgttaaagctgagagataaaggtgaatagatttaaccaggtgagaagagagatgagtgttacaagtggaagaaattgcatatgctaacgtctacagggaagagagcatggtaggagttcagaattctgaaatcaaatatggctagattgagtgtgtttgtatggggtgatgggaggaggaatgtaggtggaaagacaagaggtatatgtagagaggtaggtagaggtcagggctagaattgttttcattgaagattttatactgagggaaaagggtgcattgaagcgttgtatgcctgagagtaacatgaccacatttgcagttgtagtggccaaacaacatgatttgggttcgttgaaaatggtaatgtgtcactctagttacaatatgggaaatgaattgaagttgggcaagactagaggaaagggagcctcctaagggacgttgcaaccagttaggcatgaggtcaccagagtgacagttgcagagaaggagagacatgggggtattcaaaagttgtggaggtagaagggttaagacttggagatggacggggaagaagaggataagtaataaagaaagtgtaagaggacttccgttttctaagtgaatggcttagaggtgggttttagagagatagtaattaatgcaatttgggtcatgatgggtttaacagtagctttccaatatgaggttagctagatggatctgaaactctgggtatgaaaaaagacagtcttcaacacagatacaactaattacccagggagagagtaaggaatacataaaaaagaattgagggcaaacactagtctttaaaggctgggaggagaagggatctggaaaagcagattgacaaaaagtggacaaatacataggagaaaaatctggaaagcatgaggccatcaaggccaaatggtgtaaatttgaggaaggcaggaatgtcagcagtgtcaaatgtttctaaaggatcaagggagattatacttagttgcaataatctcttccatgttcttggggataacagttttgtggggcggaacaatggggtggggatacaaatagaaagaagaagtggagtcagaaaatgagtgtaattatttcaaaaggttttctaatttaaagagagagagagagagtgagtgagatgggcaggggccagggaaggagaggcaagaaggaggatgtggtgatggctggccaggtgaggccctcagggaatacaaacaggtgggaggagtggcgaatcctgagaataggtacagaaagaagtcttgaaaagaagaagaaagactgcttccattactctttaaagtgaggaaggagagaagtgtttgagaatatgcattatgattagattcagctgcaaatgacaaaaatgatgcaattagagtggcttaaataacgtaatctgtatccctctggttatggaaatactctactttgtctgttcatggctagtgaggtgttccccaaactcaggcacccaggcctttctgccatctggacctgttgcacatggccttgcctccacagtctaaggcggcagcatctgtgtgccagagtggaatgagggagagatgaagaagaagcaggaggtacccgggcattgccccctgcagatgctcctggaggccatcatgtggcatccttgctcacctcctcttgtccaggactcagccacattgccatacctaagtagaagagcatgtgggagactcacaatcccctgtggatgatcacatgcccagacaaagtcaggggcctaccaccatggaaagagggatggacattaagaaactattcgtgtgtcacatgaaaggaggaaaaagtagtattcccttgataaggatggaagaggccctctagtccatagggtacacatatggttaaggcaattctaccataaaaccatgatgtttcaatatcactagtcattagggaaccacaaatgaaaaccacaacgaggtacaacttcacacccattaggatatcgctgatgaaataaaaaaggaaaataaatattggtgaggatgtggagaaactgaaacccttgtgcgttgctggtgggaatgtaaagtgatgcaaccacagtggaaagagtttgggggtttctcaaaaagctaaacaggctgggctcagtggttcctgcctatagtcctagcactctgggaggctgaagctggaggattgcttaagcccaagagttcatgaccagcctgggcaatacagaaaaatctcatctctacaaaaaaatttttttaaaattatccaggcgcagaggtgcacacctgtagtcccatctactcagggggctgaagtgagaagattgccttgaacccaaaaattcaaggctacagtgagctatgattgcaccaccgcactccagcctgcacagcagagcaagactcagtgtctaaacgaaacaaaataaaacagaacaacattaaacatactaaatcagtcagtgaattggaaaaaaataagctaaacatggaattaccatatgactcagcaattctactcctgggtatatattcaacagaatggaaagcagggcctcaaacaggtatttatacatgaatgttcatagcagcattattcacaatagtgaaggtagaaacaacccaagtgtccatcatcaacaaatagataaacacaatgaggtctatgcataaatgggtattactcagttttaaaagggaaggcaattctgacacatgctgcagcatggatgaactttgaaaccattatgctaagtgaaatgagccagacaccaaaggaccgataaggtatgattccactttcacgaagtacctagggtaggcaaattcatggagaggctatcaggggcttgtgggaggagggaaacagggagtgatttaatggtcacagagtttctgtttgggatgctgagaaagttctggaaatgaatggcagtgatagttacataatattgtgaacatactcaatgtcacttaatggtacacttagaaatggttaaaagggtgaattttatttcatgcgtattttactagaatagacaaatgaaaattaacagaagagataatcagctgtctgtggtgtaggaaggaggcaggtaaatgtgtaagcttggtggcaggaagttaaaggagttcgcatttgctggcttttatttgccctgagtatattgcagggaaaatagtgtgtgtttgcacacacctatgtccaggtccacatgtttgtgtccatatacctgcagcctggtttttccaagagagcaaaaaggactaagctagttgcttgtgtaatgggagagacagctgatgagtgaaccagagaatcctgtgcagtattaatcacttttccctcatgccactgtcttttctctggactttaactaaaaatataatctaccccagtcttctttctttatccctttttttgattctgctcctaccatttagggccatctcccaaacatatccagagctcaccacttactcctttcttgcattgcctttttaaggaattaaaaagatatgtttttatctttacaaattacaaagcttattatatcaaatacatttcttaatctccacatcaatcagaatatcctttctcagcccagtctatcattaactttaggggctgagttttttccccgagcccttattttcaccatctttcaaataggatatttgaatttccttggaagatagttttcacatttaactgaattaactgtgtgaaaactttcggcactcaattcatattgcaaaattaaaagccaatgtttttgaagctcactgacagcacaggtactcgtgactggacctccctatcaaagtcatctgcttccctttcttggagctctctctctctctctctctccctctctctctcactctgtccccagcactcccctcttcactctgctccatcgccccaccaaacactgaacactggtgcccttgcacagctccatacctttgcaggagctgctctctaacgggaatgttcttcctgcaggatcaggacagtggaacactgtacattcccatcttagttatgagtgatgatggagtaaataagaccaggaaaagaatttaagaggctgagaaaggagaacaacaatagcagaagagggtgcctttagttaacaacaaagtattatatatttcaaaacagctagaaggcttgaaatgtttctcccacgtaggaccattgtttgaggtgatggatatccctagcaccttgatttggccattacacattctatgcatgtagcaaaatatcacaggtaccccataaatacacacaaatattatgtatcaataaaaacatttgtaaaaagaaaatacatctgaaacccactccccccttaaaaaaaaaggagaacaaaagtttgtcaagactgactccaacccatcatttttataattagccttcctggggaccccggtttctaatctgccctgggaaaagagaaaggagtctgtgacatctagcatcattagaccaggactctccaagcgtggtctccaaatcagaaagtatggggccagaccccagcaatctgtgtgtcaagaagcccttcaggatattcatcctaaaatttgagaaccattgatttaaaggagtgtgaagactgaatgttgggagctctttctggaagggccactcccagggctggacatgtggaaaaggaagcagcagcatggaccctgcctcctgggaggggcctcagtgtctctcgaatactctcaccttagaaaaaaatcctttaagccaccgggacagaggaggcttggtggtgtgtaagccgtataaatatgtacattcacttatctatgtaagtacatatagattccctttggctagggctgccagatttagcaaataaaaatccaggacaccagatatatttaaattcctgatcaacaaatgatttttattatgcagagcacatactaatactaaaagacatttgggttttgggttttttttttttttttttgcaattcaaatttaattgggcatctttttcttgtttttagcaggcaggatatcctaccttttgcccgtaagtattaggtacttagtggaaatagcctgatcagaatcagtgtctaaaaggtagaagtgggttttaatggcctatttatttacattttaataggaatgtgtatgagttggcagggaagaaaaagaatgctgctctttctggctcattgtattattttaagatctgtatttggggaaagagaaagcaaggaagagaatatagggagaaagatggtggttggcctggagtggtggctcctgcctgtaatcccagcacttcgggaggtcgaggcgggcgaatcacttgaggtcaggagtttgagaccagcctggccaacatggtgaaacctcatctctactaaaaatataaaaattatccaggtatggtggcacgtgcctgtaatcccagctaattgggaggctgaggcaggagaattgctggaacatggcaggcagaggttgcagtgagacaagatcatgccaatgcactccagcctgggcgacaagagcaagacttcatcacaaaaaaaaaaaaaaaagaaaagaaaagaaaagaaaaggaaaaagaaagatggtggttgaaagtagcctatatgccagcaagtcctccctctagtcaagtaactgagcacctattatgggccaggccctgattcacatgaccctgagtgagatgagcagcaacgctctaggaggttgagctccctgcctcgggcctggctcctgggcaggttccctgcagccaccccttacctgccccaggtgacaggatgccacctcagagggtgggaccttgatgctgtggctgggcagtgaatgacaagcttcctaatgagatggagctgggggagcggcttgctgacagaacaatttgccggtgcccagaatatctgcccagcctcggcaaagcggcagcctggcgggcggcagaagaaatttcaggatttatcattcgccttggtggcaggtgtgccgtgagccgccctacttcccgctgtgcttctctagacctgcagactggatgggcaatccacccaggcttctagagcctcgggaagaacgtgtaaaactatttcctattttttcctcctcctgatcagcttgtgttgatgtaaatgactggaaaagcagttttcggcttattttcacagcttaagggcttcgtgagaagcttattattgaaaaattagaaactgaaaacaacttcttagacaatgaaatagcaacccagagactgtgtgtgtaaggctgggtgtgctgtaactggctgcgttacaaataggaactcccctgggattcagtaatcaaacacgtggcaacaggttgtctgtttcaacagagagtgagtaatcaaaggagatttgcagttaatccaaatataacagcaaagcatccaagggaagcccggggaaaggagaccagaagggtgaggggtggatgaggccactggtttggagttccagatgcaacagagagaactgggagaggggcagaaggttgatctctctgggtgcttgtgttggtccatttgcattgctatgaaggaatacctgagactgggcaatgtacaaagaaaagaggtttatttggctcatggttctgcaggctgtattagtgtggcacaagcacctgctcagttttgggtgaggcctcaggaagcttttagtcatggccaaagagaaggggcgctttcatgtcacatggtaaaagagggagtaagaaagagaggagagggaggtgccacggtcttttaaacaaccaactttcgagtgaatgagaatccattactttgaggaggggaccaagccattcatgagggatctgcccccacgacccgaacacctcccaccaggcctcacctccaatactggaaatcacgtttcaatatgagatttggagggaacagactatcagcaatggaggaacaagctgcacagaggaaggggaaactgagtcttggctacacattgaagcaaaccagaaaaataacctgagcacttggcccctacacttgaccagtgatgtaaaatttgggaggaattaattagcattcagtgatttacttcaaaatcctgagtcctacacaggattgaggtcggggtggagaaggacttgctccaactcgatgggctagaaagaagaaagtggtgcaggcctgggaaacagtggtaaccatcagcatttcagggagacacttcagtttgcatgtgtatctccatggttctcaaagtgtggtccctggctggcagcatcagggtcccctggcacttgttagcaatatgaattctcaagccccacccccagagagccctctgactctggacctctgagaggaggcccagccatctgtggatcaagaagccctctgcatgattttgttgcatacttcagtttgagaaccaccagcagacctggttacctggccagaggtaccaggaggtgctcactcagggttcgtatgtgggcttgtgtgtgaactactacgcccagtcccaggtgaggtcctggagcaattctgtgctgacccatctgtcctgatcttcctaaccacacggggctgcggggaaaggcacacttactacacgtgtgctactaccatgtgccaggcactgctaaatgttttatgtgtgatattttatttaatctttccctgaaccttgtgaggtaggggttgtagatagcattttagtgctgagaatatttgagttcagaaaggccaacttgcccaggtctctatgtttcctgagtctgtacccttattcattctcacgcagcctctccgccacatacttctctgtccccacatgctttgggtgccacctacacaaagcaactaccagcctggcagggccccagctctccactgccaagcttggccctccccgccccactccttgcctcatgttaatttcccacctgagtactgagtactttataaatagcaaatctaaaatgaattttctaccagcgatcattagctcccttgacatccattaaacattctcgcaagcagagcgaagtgacaaaagggattgatttttacagtatgtttaataggggaaaagaaagaaaggtgttgacaagtctttttttttttttttttctgtcctgatatcaccaggaatttgaaatcagtcaaatgacttttatctgggaaaaaaaaaaaaaaaaaaagaaaagaaaagaagaaggctaggattgggtgcgggaggagagggtcgggagacagaaacaggctcccagcaccctgtgcggctcatttctacacccgtgacaggtaaacataaagttagttacctagtgccagccaccaagatgaatatgtcagatttaatgcttcaaaatatatagggtccaagccagggagggagtagcggggagtggaggaggaaagaaggctgtattaagggagagggaaaataaccaatcttctgctgaaactattggaagaataaatgtgttgatgcaatagttgaagtcagagaaggctggcatatgaggcactgtagctgaaaatttaactttgatttcaattttcatatttgtcagcgataattagattcaagaaatgttttgccactgctctaaaatactaataagtagaggcctttgtagtttggttaatggagtcttttttcctagtggtctaggaaaattccattaaagcaaaaagtcatactatattacagtgtttcaatacgcattgactctgctgccgcggtgatatcatcccagggatgggagtcctgtgtgcaaccacagagcccctgaagggatgggagtcctgtgtgcaaccacagagcccctgaagggatggtagtcctgtgtgcaaccacagagcccctgaagggatgggagtcctgtgtgcaaccacagagcccctgaagggatgggagtcctgtgtgcaaccatagagcccctgaagggatgggagtcctctgtgcaaccacagagcccctgaagggatggggttgggcttcataggccttagctgtctatcatttcagacctgcacagacctccctggctcatgggtgagggtaggggagagagaagagcaaattcaataaagcctcgccttgagaaggatgtgttttataagcttcgcctcctggagcaggttgaagagagggcaggaggagttgatgggcacctgcctgaggagaggaagcactttccctgctctccccagtctggacgcctgttgcctgttcctttaatgaagaagctccacccagtggcagaatctacatgcactcctcctcccaagcctcagcctgctctgaaagtctggaaggttgctttctcttgagatcagaatttgattaagagaaccaaggtctattatttttgactggcttttccctggagtgcctgtgcatctctgatatcccaggtaactccctgcagggcaatatggggtggattgggcttcacctgctttaatgtagaggtaagtgaagggttaagtgtattgtgcccacacactccagagagttcctgtggatgagggaaggcctagggcatcctcatctcccttctaccctactttccacaccactcccctgccgtcagggattaataatcacatgctgggcttattcagacgggctctctctgtctggaacgccctctcgtaagcagactgctgctgcagccacctgttagcccatctccctgagcccagggacctcacggaccctgctctcaattgtccttcccaaaactctgaagtggatccccagactgggatgccagtccttgccaaaagaaagccccatgggcctgtgtgatctcacccacctccccacacatgggctccttcatgtcaaattgtgctcttcttgacatagtagtagagagacttggaatttactaatcctaaaccacaaatgggaagtgatggaggaatggacagatggcaggtaaggggaggagggtcccaccaggattgccacctaggcctggataaagatgacttgcagaagccacacgaagcaaaagggagatcacgcccattccattagtgcagggcagcagcaaccgcccatccttccctgtgcccatcctgggtgcttctttcctggccccgtgccctcctcctactgcccccaccaccacctcccagggtgaacagagagggagggcctgtacttcttcccaacagcgcaaagacctacctttggcccatgcctctctctctccgcccctccttccttccctctttccccaccaatcgctgcctagctgcagcttcacttttctctagtggcatgtgccagatcttatccctgtgaagcacttgaggatgaaagaaggaaggggatattaaatccaccagtgatacgtgcaattgggagaggcttttgttgtgtcatttcctacctccttcagcctattaagcaaacaaaagtgcttgtggaatgagaaatgtaaatggccaatgcaagccgattaatcctagatgtacaattccattaataaggccgctttttaataggcggctctggcagcaacagcaggcaggccaggaattgatgtattctctgtaattgtattgcaactaataggatatgaagaaaattgtaccggagaagcaggtctttcaacacgattttccaatcagctgaaataatgacttgcaggggaaagccttgaaaaggaatgacacacacaaaaatacaacatcgtccagaagtgtccatgattcccagtcccagcttgaagcttctttctttctttttcccctggcttccctcatttctctctctactccactctcgttcttcatctcttcttccccataggtaatgccaagacccagaagagtctggtcacctgtggagggcctcccagggagattccccacccctgccccccagccttttgcctgtctaggccccctcactggctgagattgcttggtccaccttttgagaagtcagagcgagaaggagagaggctgggtgctctatggagagaagactgagtagggactcagtgtcggcccttctactaatgctagttgttgagtgactttggagccatgccttcacctctctggattcttatctgaacgaaccttccagccccagaatgcagcagctctgagtgcattttcaaagatcaggctaggagaaaagctggcatcctttcacttcaggaccaacgaaggctatctaagaagaagagcccttttctaaaggggtgtcctcattatctgaacatccatctactgagaggccctgcagaactcaggcatctcagcgtcgagctcagctttggaaatcaggcctgtgtgcatacttaatcatggataagttggtcaattcactccttccttcaacaaatatttgcggggtgtcaatggtgcactaaggcactgttctaggttctgggaatgaaacagtaaataaagcaggtgaaacagaaatcaatccttgccctcatggtgcttgcagtctatccagtcagcaacacttttggtgagcctaacagctggggtgttaggtacgggacctttctctgagactacttagggatgggaactaaaagcccctctgctgttgtttacttggccaaggtggcagtgggagccaggctgccttcacatgacccctgccagcacctctcagtcctgctctcagcctctcctggtcactgggtctctgtcctgcccatttgtgtgtggactctgacccttccttggtcacaggctggagagtagatataaaaagaaaaggcaaagcacatttcagttgaagtccccaaggaaactgatatgattgctgaacagaaatggttccaataagggcagagaggaatattgcttttatagcttttgagacataaaacatttagaaaatgtgattgactggcagggtctaatttatcatttatctcattccctctgctctcacactctgtcttgctccccacaacacccaggcagacactcatgtgcaaacttttttctctcttttttctttcctttcttcttctctttctgagacttggatttatcatcattccattaagcaggagaactcctgtggctatttataattaatgctcagaaacctgccaatccatttaatgacactaacaggtcatggcccccttatagctctccattaatcatcattagaaccgctctgagtttttacattccttttaaatgttaattcacctctgtaatgctccttttagttaaaactgtgaagggagaagtggctggtgtctccatgctgcctgcctgggaatggcgtggtggggttgatgaagtctggctgatttcctctgttctttttctcctctgacccctgtccctgctaccagatgtcaacccagtttattctttggttgtctagatttatcttctaaaaaacacccagtggcttaaagttctgggcaaataaagatatttgaatacctttggcctcccaaggctcaagcaacaacctgtgagaagttcttggcttacccactaagacccagggtcctgacgtggcagtgcagctcctagaggtgagggggcagaaagggttctggaggtgagcagggtctagaactgttcatgcaatgtcccagcactcaagggcaggctccagaaaagcaggtaaaaagcagtcaggtaaagaattatctttctttctatcaagagagctgaccacttgcttcatttttgctactgatgggcaatgagactgggcaaaacattcaacctccttcctcacctacaaaacggggtccatatctgtcatttccaaggataagggttaaatctataaaatattaactggcattgaaatcatcctggacttttaaaaccgatctcagtgccaggcgtagtatcagtgtcatttcttgagcttctctgccactttcctacgcacagcttgacctcctgctctgcagccttcatccccgtggatgtgtacaccttcacacctctcggtctgttgcttttagatcatatttcaccagccataaaagtatattttgaatcattaaaacaaatatggtgaaagaagttaaattaagaatgggtaacacatggctgggcgcggtggctcacacctgtaatcccagcactttgggaggccgtggcagggcaggtggattacttgaggtcaggagttcgagaccaaccgggctaagatggtgaaaccctgtctccactaaaaacacaaaaattagtcaggcactgtggtgggcaactgtaatcccagctactcgagaggctgaggcaggagaattgcttgaacacgggggacggaagttgcagtgagctgagattgtgccactgcactccagcccgggcaacagagtgaaattctgtctcaaaaaaaaaaaatggggaacataaatgtgaacaccaattctgttattgattagctgtgcaactctgggaagctcacgtcacctctctgggcctcatttcccttacttctggactctatatttttaagacgccatgatctagtaaatcctgtgattttattgctttcctgtgagtcttcccaaggggctaagacagtcactcaggaataactgggaaaaagtggtcctgttttgaccatctgagctcttaatttttcttgtcttgtcaagtgacatgccccagagttgagtgctctaacaaaagcaaacacaaatatatgaggaaaatagacaaaacatttttaattcatttttgactcactgtctcatttttctaggcataatccatcttcatgttaggcctttggaaccatacacttgaatttactttcaaggctgcctgaaatctacatgttcagctgagaggatccctcagggccaactagatagcagatgcctcatcaattttatcattttacctttttaagtactccttcagaatagcttaacctcattttatacaggggtaaactgaggctttaagaggtaatgtggctagtccaaggctgatgtattttgtagttttcaaggtcatgagtcaagcctagctctcctgaattgaagcccagcttctaattttgtattatttcatcttgctttgcccactcccatagctttctttgggcgggcatgaggcaatacaccttgaatgaaataaagacgtgtcctatcagttctcctgttctggcatgagttataactagtgacctctgatttggactagcaacctcctttcctgagtttattcttcattgtgttcaagttcccttcggcatcaggatgtataaatgggcttcctgggggttttctataagaaagcccaccagccatgccttctcttttccagtctttgtacgtgtccccagttcttacagggacagccatactcatctctcccttccctgcagagcaccgctgatagtctaagtagacaccagtccccaggctgggctttggccatctgtctgcccttcacttgagaatgcaataaaatctgcttgacaattatgtcagtacaaagggcagagaggactgcatgtcaaaaagctgtgtaaaatttattctttcaaaggttgtatcaagaatattctggccaaaaagagctctaatagcaactgatcactgtgtcatctgattctttttcacatggctactttcccctattagtggatttgtgttagttctgcttgggaccaagttaataacgataagaccttatcataatgtagcactgcatatgtttgaaagggctttcacgaatcgattatatcatcaaatcttcatgactgcagttggattttagaaccgaaagggctttggaaaacacttaacccaacattctcagttgattattattgatgtattttgtttagcttaagtaatgtatctttattaaatataatttggaaaccatacaaaggaagctttaaaaagatttaaagtcactcatgcacaattacatttaatgtatttttttctaattttttcttattctctgccatggttttcattatgtagttataatcatatcatttatatctcatttttttcttttaagaatagatcagaaacaattttccatgtcgttacatagtattagtgagcatcgttttaattggtttcattatattacatcaagtagatgtacaataccactgcactgtgtttggacatttatgttgttctaattttttgctgttgtaaataatgtttcagtgaacatctccatgattatggccttattccactgttatgattatttccttacacacgatcactatacattctattaccaccaatactcttactttactcaggggaaactgaggcatggaaaaacaaagtgatcccagaccccgcatccagttagtaaaacaacacagaccccaagtgaggtcttttgtctcttggtttcacattacttctattatataatatagtggttttcagaatttctaaataaaaggcttgaacattacatgaaagtaattttatttttagtacccagtggttgagaaaaaattacaataaaaactgcaataaatattgtagcacctgtaaacaacgtgtatgcaattaaacacagcagcattcatatgtacttggaagtggtgcaaacagtgcacttggagagaaatgcattgaagctgccgacaacacttcatgtgcatatggaccctaaatcccttttaaaactcccctcttctcctcgcaccccaaactcaggtccattgttctttaaaaagaaagcatccttagtttgctgccaggatgttcattccaagctggagtccatgggtccatagttatctccctttgaacctctcctgccctgaatttacagggatagcaagcatggtagaagagagatggactcacgattctgaatattgagagctggaatagtcctgcagtgagattaatgtacagacttcagggctctacaacccaaaagaagagtctccagtaataacagtagtttaaatttgctgactgccttctaggtgctaggtacaaccccagttgctatgtatggattgtatctgttcatttttacaagattgctgtatttgtcacagtttcacagatgaggagactgaagaggatagttgaactgacacagaaactgagtgatagggtggggctttgagtcctggaagtgtggttgctaatcctatactcttaccctcagcacacagagcccctcactcagtgtccccagacatttgagaagagatgtgatgaggccggccatggttctcttgtggtcagctcttgttctaatccttagcgcccatttggaaaccagttatggggaaagcacaatgtaggactcttgggactctgcacctgactggctggctttccaagatcactgagatggctcttcctccagcatagaaattgatggctggttatccagacagcaacctcttttgcccatgtgcttggtgctctgtcatggcgggaaaagtaactatgcacagatcatgattatggtattagattgggtacacatgaaattgctagtatgcacctattttgatgtatgaaaatatcattttcatgagattcatcctaatttatgctatgtatggggcctgattgccctaacagctcatcattgattggtagcatgttgtaataatgaaagagagatggatatctagctaccctacccaccccccatcagcataaggaagccgagaagggccccagtaaagctgagaacattggaggatgacaaggctgtaaatgaatagacaggacgtcacctgtcctttctctccaatctctctttgtgtcccctcagtttaccagctgtcccgaagcaattgcagctcagtgtctgttcccactagcttttgtgagggctctgctggggcttttatcccttgtgctgaagaccatgctcattttctcaaacacaaagcaccagaggagctccatccaaatgcacaatctttattcccggaccgtgtctctagtttaaattcctggagtgttggtcaaaagcatgggattgagaactagagggaccttggcttgaatcctgatgctaccacttactgtgtgaccttcaacaatttatttactgtctctcccagctttggttttgtcaactattagatgattttgataattaaagtccagaatagatgtaaatgtgttgatgggcattgtcgacatggaacacattgttacctccttcttttctgaatctggtgactagaatagataccagaaaagaaaatctgaagtttctgttttcacagagaaaccctatgtactgaactgtaagctgatacctaagttccagtaagtattgatatgcttatgtggacaatgtaccaaagcatttgaaatgaggaatgttttagaaaatctaggatatgtgttatcatttgatcactctcccttccttgagctttgaataaaaccacttttcttcctgctttctttgggtctaacattgggccttctatgtttctggagtctgatactgaacttcttcagcaataccttccctgccacccctgccacctgccacacacacacacacacacacacacacacacagaaatagaaaaaaaaaaggagagtgaggcatgcatagacagacagaaaatttgagacaaacagagagagacaggagaagtggaaaggagaaagcaagagatagatcaaaacacaaccacaaaacctaaaaatatttagcctttaattaaaaaataacaacaaaaaaacacctagaggccttaaaaagcatacccacaccacacaaagaatacactctcaggtcatctagctcatcccaccagagggccacatcccatcaagagagctgtagcatttgagaaggtgtcttttttcatggtagactattgggaagtctcttcttagttgtttccttgggtgaaaacatggattttgaaaacaggtagacaagggttcaaatccctgatgggccctctactggatatatgatctgagcaagttatttaacctgattaaatggaactgtaataccttctcttaatgttgttataagcgtaagtgcagtaatatgtagccatacttgatacatagtagatactcagtaaagacatgattttaatttctggaattcagatgtcctagtagtgattacttctttctctgtcttccattggatatcctttatacccacctgtgcccctctactctctgaagatactaggcatttgaaaaagatgttctacttgagactattagaatggtaaactattagaaatcataaagaatttcctccagataaattttaccattgaaaacttcttcattaccccataattatcctcatcattatgtgagtcaggccactggaaatatatatatatatatatatatatatatatatatatatatatatatatatatatatatatattttaatttaaactaggaccttcaccaagagagagactaaattatgactaatggccattccttggcctcttagttacagatgtaggagagattgttagccatgtcttgctcagccatcaaagtcttggcagaagacaccttgctcttgtggaatagcatgccctgtgagcagggagttattctaagagagtttctagatgtagtgccaattttggaaagacagctggcaggaattgggcaaagggtcgtcattgacctatatgggtgggagcatttggcttcacagagccctaagcatagattatattccaaaaataatgttatggatgcaacaccatgaaaatcacatgtcatgtcataaccaccatgatgaaatgttggatccatatttagcaattattgtggtctctgctataatactcagttccttacacaagaacttgtctaggattcagcagtttatactgaggtgttcagaggagcatggttaatggagaaaattgcttatctccccaagaaaaagaaaactaagtcataaaaaaaaaaaaacaaatattggagaatcctgcttgcccagtggccaaataggggttagcagattagtttccatgggaagtgtcaaagaaacaagaaactaagagaaaaaaaggagtcacacagaagatggaccacattaatggggcctataggaaaacagcacaagccaaccaatggagagagccagtccagccatcagctccctcgtgcgtgcccactcagaatggaaagatatacagagactaccaagaaccaacataagcctgcaagagaatgctactgtctaaaaagtaattcttaaagcatataatccagaatgaaaagtccaggcagaatgacatatcctctggccatataagtactattgaatctttaccagaactcttattagaattttacagcgtctgctgtagtaccctagagatgctccataggaatgatcaaagggctgtatcatagggcctgtgaggactgtcataaggtaatggtgttgtccagaaggagaaagaaatttaaggggtgacttaataaatttcacaattaaaataaaggatactccatgtggatgacaagcagctgctcttcattaggctttggggactgaagaagtcgaaatccaatttaattgcagtagaaaaagcttagactgcataaaaggaacagataaccaatctgcttacaactttttccagattctgagatttttaggcctcctgaattgtcactgttccctgagaggagacaccgtttacttacaatccagtcacagacagactcacctctttgctggaggtgtccctagtagtgaccatgtaaaataatgagacattcaactgagtgagcaatggctcaagtccacctctgtgtcccaaatgttacagcacatcacctacacataaacccccagtttttcactccattcctattttcacttcactccttactttctatagatgctttggtcctatgatcactcttgcagacactctcaactctctggttctctttccttctattgtatttttctggcaaaaatctcaagtctgcttgacaccacctatccactttctctgatcctgaaccttcataactagatattgctggcagaaagaaagaaacaaacaaacaaacaacaagatcaacaacaaaaaacccaatgtggtctgtgtcattttaaaatctcagagtaacaaattgcaaatgggtgtttactactgcccaggaatcccactatgcactcttaggaggtttgcttttctttcttcagagacatctaattcgtatcttctccccctcctcaaaagttttataatcttccaaaaatctccttattcccacttggagtgaatgactcatatttcattgagaaaacagaagcaatcaggaactaacttatcttccagataccaaatctcagtatacctgcctttcatttgtagggcccgaaattcactcctgttataatggaaaaaaatatttctcctcattttagagttcaacatctcaatttatgctctggggcctctcctctctcccctcaaggatttcaatcctgcaattatcttcctctttcttctacatcattgcatatttcctctccactcggtcactttcataagcacataaatctcaccaagtatctcccatatttaaaatggcaactgcaacatcaacaatctctcttgacctcccttcttcctttagctacaaacacgtttctgctcttcttctcggtaaagcttcttacaataaagatcttcatgtacagtcttcactttttcagcactcgcacttccgctttccagcctggcgttggtccacaccaccccactaaagctactctcatcaaggtcatcagcaacatttataatgccaagtgcagtgctcaatttccaatctttaatctacctctcagcagcgcttgacatagatgaccctttctgtctttgtgaaattgttcctcttggcctccctggcatcgcgccgtcctggctttcttcttacctcactaaaccctactctgtttcttttgtttccatcttcttctctgtatgctgggtctgcaaggtcttggtcttcaggcacttcctctgtcgatccacttctccgggagatctcatccagtcctgtggtttccagtgacctctatatactggtgactgccaattttacatcactgcccagaccttccccatgaactccagattaataaagacatcccacacttaatatgtgattttgttcattggttcatccatattttcatgtctctgaaattgggacacatccttcaattgatagcatcttataatctgcacctgcccaatggagaggtttagttgccattgcctgaacaagcaccgacttagtcacattcccttcccttcattgagtgataggcattgctggtactacatgtgttagggttaattgccatttaaaattccttcaaaaatgattctttgaatcacacagtgattcgccattgaaataaaaatgatcacatacacagcaatgcatagaaagggaacagcagggtgtaaatttgataacagggaagtgcatatctgtctatggaagaatgaccacaattccgtattcccctgcaaaacaacaattaagggctttatgggaccaaagacagaaagaacatccacagctgacaatttttttgttgagacacatgaaaggttgtctgttacgcttcaacctaaggcagggagaaatgggcaaatcccttggaatagcagaagagttctgatcaagggaggctggtatgaccaattgaaagtgtccctcactctttcttggtgacatttaagttaattacacaccttagaatagattacatctgttgactgccaattttatatcaatgcccagaccttccccatgaacttcattgcatccatttgatgcaatatgtgtttcaaatggaaattgtagtccaactatcttctgccccagtgagaggctgtttttccctgagtctcccctaacttagttaagggcacacttctaaacttattgcccaaaccaaaacctaagatttttccttgtccttccctttccttcacccttaacatcaaatccattagcatttcttgttagttctacctataaatatatctccaatccatatttattcacgtttgcgccaataccttcatgaaaggcaccttgcctgaactcctgcagttgcctccaggtgggttttgctgcctgctcattttcaacccatcctttatctcatgcctcctacaatccattcttcaaacagtaacctacatactttccaagcatacatccaattttgtcactcggctttatacttggaatgaaatccacacccctcctctgtggtctgttggcctccacttgcctcttagagaccctcatacatccccatcttcctcagtgagtatgctccactaaccctgtccctccttctggttcttaaacttgccaagtttggtcttacttcagggactgcacacttgccatgtcttcttcctggaaggttttccctccagatctgctgctgctggctgcattccacaattcaactctcagagagccctttctctttcaccctatttacttgcactccgtccttctctatcaggtattctgtgtaacttcctgcaactttctgaaactgtcctgttaatttgtttacttgcatattgtttatttcctccaactaaggtattaattcaaaatgacagggtattgtcttgttcatcactgatctttaagacttaaggtggtatttggtaaatagtagataattgctcaataatgtcagagttaaaaagggaaagaaaatttctttattattactgggaagtgatatatgaatgtaagagcatcatccctccaaaacatgaaatatacctcctttctatctagaaactgggacaagttgtttaacttcatttactttctggtcacttattaatttagtggccatattaaaatccttatctctctgagggattttaagaatatattgaaacaatttacacaaacaaatatcttgccacacagtcaagtcaaccttactacagcagccctgccttatcctcacgggataagttctaagatccccagtggatgtctgaaactcttggataacaccaaaacctatatatgctatttttcctcttatacatcctatatataacatatgataatgtttaatttataaattaggcacactaagaggttaataacaaaaactaataataaaataaaacaattatagcaacatactgtaataaaagtaatatacatgtgatcttgatctctctcacaaaatatcacactgtactgtatttaactatttttggacttcaattgactgcaggtaactgaaatgtggataagggagaatgactgtatatcactctgagaagtggataaaagctctttccctcctcccagagtgcacaaatgtgctctagggaaatggataaatgtacatgcataagtaacttttcattgagcagctccaaagaccacaggtaaaggcactttcctcatacaaacattggttcacattaagtctcttttcaaggtgattaaaacgactcagaaagttaagatgttccctttttgcagttaagaccacagagtagcatttacgttttaaatattgaagacgcaagtctgtctctagccacaggcactggcttactattttcttggtcccagagccagaccaactaactccacttaccatttctatcagtggcttgagggtgtccagagaatatagttacaagactggatttttaaaaggaaggaagaaacccaaggctctcaggagaggaccgaagtgactcaatgtgcctgtcatgagattcagtaagttttcacctaagcagatctattatgtggccagaaaaaacagtgtcacaaaagacagccctctgcactggcactgtcctttgcttgtcagtttgtatacaagagctacatacaatgccctggaaaacagcacttcgtggaattgtgtaatattttatagcagcatccagtctgcagactcaaaatcccagtgactaagaacaaaggtgggacatgcagaacatatgtgggaaacattcctcggacccaggggtgggacaggtcagccaggggaggaggaggctgaagaaagggaagagccacagaaaggctgaaagtggggacaaaaggcttccagcacctcccttgcactctatttgggctttgtcatactttctgccttaactcaaatactacagggtcatccctgatgggtataaaggggaaggagtcatgggtcagaaagagttcctaggacattcttgccctcgaggtttcctggctttgcagctggaaccagggctggctcccgggcagggagaggagacgcttcctgatgaagttcgggcccacccctttctctgagcaaatatgccagtagcatttgggttaatgaactgtgccttttaataaatggttcttatctcaccagagtggtgctaaattgtcaggattttaaattaacttaatagtttcgtggatggtacttattcactggttactccgaaagtagcgcggcccccagccaggacttcttattgaattatgcaacagttagttatttcatttaggtttaaggggaagtgtttaggattaatgtgcaatgcctcagtgccccccttaatgggcatttccaggcctcccctaaactaaaagccagttattaatcactgggtcactcagttgttctgtcgattgagagaagtgattgctctggtccaggaatggccaacaccctccccggccaaaagagggagacaaaacgcctgtcttctcttgctcacgtttgcaaaatatttgctgagatgtgcaaacccctatcctgcctgtaagaagcttacgtaagttagaaagtggaagtactatgacagaggcagctgtgaaatccttggacttttgaagaggaagaaaaatgaattctgtggagaggagaggcagagtaggggtgaagcatctagaaggtgctaacatttgaaaactgtataacatttatgtgattgaaaatatgaagagcattctaggtaaaattttaatcttgtgcctctctaccagataatgatcagcctttgggcaaaaagaattgccacttttgagtatttactttgaggctggtgtgagttcattgcagaaccttatgaggtatcaaccagtttgttttcaccttgcagatgagaaaactggggctccgagatggtagatgccttgtccaaagctccaggatttttggcacacaaagattctaactcaagcccaagttcatcagtgacattgttttctcgtattctcagctaaatcactcctgccctgcagacatcacatcggcactcagatcatctgcaaaacttttgtcagggattccattctgtcacaccacaaacctgactttattgttcagtggagggtgaggcaattcctttaatttactccagaggcatcatatcatcccaaagcaggttcacccatcatgcatcagaaactacctttggagaaacagaaatcaggtagcatgtggcaagtatcaatgttgtgccaagcaccgtgccaggcagggactgcagcaggcaagaggttgctaagacattatctgcaccctccaaagctgtcagggcctacataggaggaacactgtccccactaactggagatatgcaagccatgacagaaatcattgatgtcagcaaacaactaacaggcaggtgtacagccaaatactaactgtgaagcgaaatctagttaagactgcaaagtattagcatcaaacacttgtttgagaagcagaaggaagcaggagggtgtataatggagattgagaatggacatttacccctttgcactttgagtcctcattgaagctgcccctgagagcccccatctgggctacaaagaggtgttggagggaggaaacctggagaagcttaggcacagccttctggctgccttccacagagaggtgcaggagtcccacggtagttaactgggaccgccctgctgggaacttcaggtgtctctgcccccgggcaaggactctactgagactgaggagaaacagaaaacaaaacctggccctttcagcttctctgctggtccctgggagaggcacaaggggcctgctgagtggagtgaccttgagaaggtcgagcaggcctctgaagtggtgcagcggcacgggggcaggggagcggcatgagccataaaggaaatattgtctataaaagccccgttttccctttcttctggagcaggcacaaggcactgacttcattttgcattcataaagcctgcctttggaagcgcctttaagaactgctgcaggaagcctgaagaaacatgttggagggtcaaacacacatctccttgggctttctttcatctgtcttaaaaacaaaaatctctccttttttaatcatctcctcctgtaaaaagggctaatcttttgttagcagcagcctcccatggcacagcatctcagcaattaatacaaaaaagcaaggaagatgcaggtagaggagggggcctctagctgaacaggaagagggcctgggagtcaggaaggaagggtgaaggatgggagaggggaagctgaccggctttccctggagcagggagcaacagatggcagctgcaaggcaggccaggcacgggtctcagagaaaacgtcctattgggttcagggtttggatgcagatctataaatgtggccagaaaatccaaactagttccatcaaggagggtgcagaagccaggtgtggtagctcacacctgtattctccgaggtaagtggattgcttgaggcaaggagttcaagaccagcctgggcaatacagcaagacaccatctctatcaaaactaaaataaataaattaataaattagccaggcctggtggtgcatacccgtggtcccagccatttaggaggctgaggtgggaggctcacttgaacccaggagtttgaggttgtagtgagctatgagctgtgattgtaccactgcactccagcctaggtgacagagtgagaccctgtctcagaaacaaacaaacaaacaataaccaaaaaaaaaaaaaaaaaaaaaaaaaacagagaaggacagaggaagtcatttcggtgggccatgtctgttggatctcttcttcctggacacttccctgatttcttgcgtcaatctttttttgtaattatgtcgccttaacggaagaatatatccttcaactctgttgtaaacaaattggtattttctttatttctgattacggcctttgctttaggattgtatttctaaaaatatactattaccctgcttaaaacccatttatgcctggtgttccattattggaacgctaaacatgtgggagttatttatatcctactgctcgagggcatcagcaaggtctacatcttcacactgaaaaaattgtaaccacaggcataaatgggttaaaagcctcccaggatgccccatttttcctaggctaaaactccaaacactacagcgttggttaaggcttttgagccctgagttctataaacatttcaccctcatttgctgccagacacttataccacatacttctatcctcatatccatgacttggccatgttctgatgcagttttgtccctgggggttcccacctggcaaatccctcctcgatcattaaaactctgctaaaatatcactttccttgtgagggtttcatggactcctcctgggggttttaatcattttctcccagctgcttgagtggaagtccatgtgcatcacttataacgtgcttatgaaattgtaatgcaatgatttgtttatatggataattttaacctccagattttcaaaagcacggagaatgacttacccttctttctagcacaatgcctggttcctagttggcactgagcacacgtctaagctaaagattgctaaggatgtaacaatataagacaataatctaccctcaacactcaaaggtaagatgagaaagaggagaaaaaggcttccggattgaggtgattttatttcaccagacaagactaaggggatggagagaaaaggcctcctgaagtatttagggggggccgtgtgtgtgtgtgtgtgtgtgtgtgtgtgtgtgtgtgtgtgtgtgtgtacttgagagctggggaagccaagtaacattgagatgactgcagtctacaactcttaggggtcctgaaatcaggggaaggtgatattcttctcccaaacttggaggaggaaacccccggtgtccccacatcgcagttgtacgtggggatgcctttccgcccaccatgccagatttgcagagcacaaagagcattccgggcatatcagagcacatggctgtcacttctttgtacttctttcccaattatgtgtttggaacagagccctaaggacagttttatgcagcaaagggaacaaaactataagcagcatttgtcttacttgtgtgaaaagagctgttgcaaaaccccttgcatggttagatgagaaaacatagctgggcccctctgttctcaagcctgggattcctggacccagacctacgtggacccttgtcttgcagactgaggcccgggtgccagcctggcaaagtgtttttcagtgtcaatgcaattctaagagcaaatttcctttcattgtattgaaccctaagagctatacattttcctcaccctttcctgttctgtgttagcctggaaactcctgccagaagggatgtgagagctgagaaggcaagaacagcatttgtttggggctcatgggcctgtaagttctcatcatgaaacaatgacggactcagcaggttaggacctgtgaaatttaccaggatagaccaagccccaggctcagcatgtatcatgttttggggcatttcagttccatggaaatgatactgtgcagaagaaaggaaggagcaaactaaggaatgggatggaaaataaaagcaaacagttgtttatcatgtgttttcaacccaaagcatagatttgtgactcttatattcacctgcataatctctatcacttcaatttctacatattctagaatattaagacaaaactgtcctcctctctcctccccaccatatcaaattagacatttagataacatagcaaaagtaaaaaagtttgttgattcgcccaagtaattgacagtaatgaatttgttgctgagtgatgtggtttattgatggcactcgtatctcatctgctgtctgtgcttataagtacagtattggtgcttagcttgttgagttaataaaatctacaaagtggtttttaaaaaataatatgtactctaaagcaattctcagcaaaagcaactcccttcttacggggcgtgtgtgtgtgtgtatgtttcttaatcatcactaataacaagaaagggaaaatgtctgctttctgctgaatcgtttaagtggagaaacctacactaggagaaccttttgtcatcaatggttttagattctgggtggagcctggcccagttactgaggtcttagggcaaaggataacattaaacctttaagacccagcaagaccttacactgccttggggtgaagacgaggcagaccttctgtacctggttttgtgaggttcacacaactctttggtccccttcctgcctcaactcttcccttgtgcccatagaatagataacggctgttctttcaaaggatagagtcaggtgccagaatagagttggtgccactttgtaacctcctcggagaagtcacagcttgcaaaaatattgttatccatgttagtgaagtaattaaaatgaactaatcattttccaaaatatttatgtattgaaagcaattccaactgattgcctttaaatagcattttattctgttttcagtaataaacaggagcgtgcttccttttgctttctggagcgccagcccacccactgtggtgaagccgccggagtggtgtgagttgagtacaagttgcgaacagtgctgatcaatggcacggcccaaccttccaaccctgaaagagccccttggctgctcttgtcctcaggccagagccgttttgtcaggagctttgggaagagctaccattctgcagttactgtggaattttctccccaagtgggaatctttgtcagctcagtgctatttcctttatatcacagtctgagagaaccagtcgtctgattaaattaaggcaggcacacagacagttgggttgccaaacctagggatgttattaaaaataatagtgtttatggctgtgttgtctttgaaggtgcaagtgagacacatgttcctgccgtgtgggcagcaggttcctggcagtccaaacccgtggggacaagcaggacaagttatggagatgaaaaggcaggaaaaatgagtccacatggttactgtgttgatctggctgtgaggagggcaggggagacgaggagggcaggggagaccatgaggacaaggcctcctgtggcgaaaggcagagggaaggtgcagggacaatctctggtagagtaatagaatcctggttcttagacccagcttgaccctaactagctatgtaattttgggcaagcctgcaactgaacctcaattcatcggccttacctgtgaacaatagatctttaaggtttcttccaccagtgtcgctcctgaactcttgaaaaagaatccacaggcagagaaaaggaggagcagggtattctggtgaaaggtggggcagcatgaagcaggtaaactctagagacacatgttacactgtggctctgtccaccaattctgggagatgaagcaaacccatgtcctgggggcatggattttctttgagcagaggctggagagctgaggtctcttccttccctctccaggactgagtggacagtctgcctgctgcctttgcctctggcctgcccattgctgagcttacactctgctgggaccccagtctctgatccctctaaaggggccagtgctagaggttggacccaagtttctcccatgatgagtgctgctgtgtgcagatcagggcagcaggtccgggactgccacttccatcagacaggttctttctgaagttcaggagcattcgggagtgaatggagtcctttggaggagaaaggatcaagggcaacactctgtgaggttctttggatgcatataccatggtctcccatgctctgccctggctgttttcccagcatccctggtttttgcaagtactggcatgtgatggactgctgccagtgatggacagagatccttaattggttcctcattccttctttaactttgtccaaatcagcctgcctatttcttcatttacaatgtcctgccttcctgtcaatgtacttgcatttttctaagttcttgcaggttctttccaacccttcagaagcttgcatgttagtccttccattgccaaacagggttgtctatacagtgctgctacccaggcctttggaaagcaaattgtgcatccctaagccctaagccccaaacccaacagattccagtctccccacttgcttctgactcctagtgtgaacaattgtgatgacgctggtgtgcatcaggcaaaagccaggtcagattcttcccttgagactgataggaccatttattattagtgaatccaatagcaggccatctggagagataataaaggatggaattggaatggggttgagctgtaattgcagactcttaaaaaggatcctaggtgtgattttctaagtcaatgggttttgaacttaaaaaattagtggcacctttctacaaagagaatctcctcgcagtgcccaatatataaagcagatgaagtgagtttgctctggaagaaactgggtcggcctgatgcctggtgtgccacagctcttcccagaagcttttggaaccccctctgagccctggctgtggtgagcacacactgaatgctattcgtctaagctgacaaactcttctccaggcaaggtcattatgggaaatgcttagctaatttatatccatattgcttgagaatataatcatataccacattattaagcataaacaaaataaccctaaatcagttattcaaaattgcacatctagtaaagagtagaacagaaaccaggactgtgggcacctgacttttaggccaggactccttctcctaaaccagtagcccagacagtagccacctatcaccaggaatctgtcagaaagcagattcccaggctcaactccaggcctactggatctgaaaatgtgggggtgaggcccagaaatctgtattttaagaaggtctccaggtgattctgatgtatgctgaagaacaactgtcatggcctaaaccacgatgactcttgaatttccccattaatttataattttcttagtggtacatgggttaatatcttggaggtttttgccctcattgtctttatgtgtttattttggtagtgggcacaggaggtagtagggaagacttaaacatatacacaatgtccttcattatttactttgggactaaggttgtcagacttggaaaatgaaaatacagaatgtccagttatatttgttgtttggataaacaatgaaaactattttagtacaagtatgctccagaaaatatttgggacataattacactcaaaaataatttgcttttttatctgaggttcaaattcaactgggtatcctgtattttatctggcaactatatttggtacagatcatgaattaggaagtttcttcttttcatgtttttttttttcttcccttttctacacccaaagccagggacatatctcaatattgtgttcttatttccaaacccctttctatgttggtaagaaaaccagggggagagaggaactagagggtacgaatggtaaatgaacttaaccttcaaactcatcattttttaccattattatttcacttacacatttgctgcgttacaggaactgctgagtaagaagccatgaaaatctttgtcaaacacacggttgcctctccctgaactcccttctacccatcaaacaccatagcctgtctgccaccttcaacattggctgatgacttcttattttctactcactatgcttggggagccaactagacttaccagcaaaatcaggtgcatgtgtataagacacagttagactcaataaacagattcagtctaaacttccattgtgtgtggggacagggatggggaacatcttgggtgaggcaaagaaaggaccactggtcttaccataagattttccaaacaaacttgaacttttaaaataacttgatttaaaaatcaaaggaacagatttaaagtcttgtttttgatataatgtccttttaaacagaatttgaattaaagagtgggttggaagattgggaggaatgttagcagagaagtgcaagtggaaaaaaagataaaaataaatgttgttctcattatatccttttctgattgcatttggtggcgaaatgatcagtagacttgttttccagtctcaattcaatttcaatattagcacgtaaccttgggggagtcacaaagcctttcttattgtcaatcttttcatttgtacaatgaggatatttgtagaattagacaacctctagtttaatggctaatgaattgtatcatttttctcaggatctactaaactctcagatctttccattaatctgaatcacagcttaaactcatagttatcctgacaacctcatgacaagcaaaatatcagctgatcaaataccatttgtttcatctataggactgttcattaaacacaaaaaataatttcccccttatcttctacagcgaaaacctacccaaactgtgggctcagggctaactctaataaaataccatgttggactcagacccctctgatctaattagtataacctgtatttgatgtggaatgctttcctggctccagaaagaattgtattttgttagatattaagagacttgttatttagtattagtgggaactggagagataagttaattggtctagagcaaacttgaaggcagtgtgtagccctataggtatagggaagggtctagcccttagttctgacctggagtttgggttattctgaatactgtaaactctccagggaatttatattaaggaaaattagggctactgttgctggatgaaattattgatttagacggaaaatgacacgttcattattttaattgaggtgttcagtttggcaatttaagtaagggttgtaaaaatgatcaagaaataaggatcaaagaacctaaactatcataactctccaaaatccatctggaccagctctcttcctctaggaagatggggcctaatccccaagaaggaagtcagtcaatgattttctttcccttgatccacaacatgtactgctagaaagttgtattttatgtctcacctagaagtccctttggcagtgtaagcattttggaaaacagtccatggtggaaagtgtcctgggcttttggcagtttcctgacaagttttgttacaggtttcatttgctcttttaatgggatttttctctgagctattggcagtcagagaggttcagacaactggctgaacaggaggcatcataggatcatagaattgtagagctggaaggaactcctgggcttgccattcagacagcaatcattttgtcttaggttcagctaggaggtagcgaggccgggatgattgtatccaatcctttttgccacatgactagactgatagagacctttaaatgtcaacaaagcaattttgaatgggattcagagctcactaggaagctggtatcaaagctgtgatgttagaggactcatagaaaccaaacgccttgctgcatcccaaaggcagcgttttgcatgggcttcaggctgccacagctttatcggcatgtctgcatttgcagtgatgcatgctagaagctatggtgcagatctctgtcgccacatctgtgaaggtcagacgccacctagagatattcaagtctcctttgtttcccatcttccactcacagggattggtaacagttctttcaaagactgggctttaaggaattgacagcaggtagagagggaacaaacagcatgtgaatgcagagcaagtggtggaggccggcacagggattaggggcaccatgattaaattggcctcgaaagcccacacatccactcacagactagacatgattatgttcctgtttgtctctgtgcaaagccaactacttctaccctggtaggagtcactggagaggttaggagagataaaaccaaaatctagatttccctggtcagtctattgattctctattaaattgcaagaaatcaaaacagatcaccaaggttttgtctgtcagctgatgtttgtgtatcatatgtatgcaaagtctcagagccaggagggcctgtactccacaccaaatctcctatgcattaaaatcagggtggcgcctcatgaacacttcacctattgttctttcattgccaagtggggagagataatcaccaaggtacgcacttacaagaccagtctagagacctcacaagtcagggtgagtcgagcaactcacttgggtaagctttcatagatccacccatcttcccatttacccacccatctgttcattcatttatccatccctcaaaaaaatggctcagcctaccatgaactgagttgaagctaagtataccttggttaaaaacaaacaaacaaacaaacaaacaaacaaaaacagacctgggcttcatccttgccattattttatagtctagtaatggagtctagtcctcagtcttagagagaacagctaaactgctggtaaattatttgtctgattttcttaccttatatgtgtatgaaaatctgttattaggtgcaagtaaattggtgagtactaccacagtgcacatgatgaaataacggagaataagacaggggtagagggaggtttccataggtagaatgatccagagaagggcttctggagagaggacacctaggctgaggcctgaaggataagaagggaccagggatgaaaagagcagacagaagagcatttcaggcagagggagcagaatgaggggaggcagtgaggtgggggaatagctcagcatgtttcaagggactgaaagaagccatcgtggctgggctgggtaggtgagggaaagagtgaaatggaatgaaagggaaggggacagaagccacatcatgtaggtggttgaaggccataataaaaagtgggattttattttaagtgcaatggcaagacattggagggagggatggaggtataaaggattctttgagctgctgtgcccagaggaaattggaggagggcagtagcagatgtcgggaggccattacactcaaataaagtgagaaatgctggcggcttagactggagtgaatgtggggcagagctggctgcccaccatttttggagcactcagcctgagccatctgtgcccacgaatgctgttggaggattctgctaggcagccatcatcaacctgccccttcctttggttgttgggagtcaggtgatcagcaccaggtaccgtgtcctcctctcacgtagcaattgctcaatggcgtttcacgagtgatggtatagcaggctgcataatgagggaccatttgtccctaagggtgtctaggccctagtctctgggacctgcaaacaagatgccgcctatggagaaaggaactttgctgatgtggttaagaatcctcagatggggagttatcctggattatccagatgaacctgatgcaatggcaaaggtccttataagtcaaaggcaggagcaggagacctgatgatgggagaaagaggttggacagctgctatgaggggccacgagacaaagcatgcaggcagcctctggaggctgagaaaagggaggaaacagactctctagaacctgcaggtagaaccagctccgcagcaccttgaccttagcctaggaagactgctttggtcctcggcatttcagaaccgtaaggtcatagatttatgttgtttaaggccactacgtctgtggtgatctgttacagcggcagtaggaaactaacatagacagcaatgctgagtacattgtggaggcttaaggcccacttcactggcaagatctttctcttcacctccaaaactccatgttctagacccactgggagctagagactggctcccattctcatgcatccctggctctttcccttctgcagagcagccattgagggaattcaaggcttgggcatctggaagtgggtgggctcaggagacataaccaagaaaagcaaacaaaaaatgcatttgttttatttctttttcattttttataaaagtccattttagtcagtctagggaacaatggtgagagtgtcatgtctttagaaccagcatttgttggcaaatgcctggtctggttctcctccatgatgtaatgcctcctctgcttcacgcagaccacactctggagcttcccacccattctctagccttggcctttctcccttgccctctcatctctttctccagtctttcttcatcccaagcagatggagtgtgtacccttagacctggagtccagcacgcaggcccctgcgggtgtgagatgggctggaagcttgaagagaattcgacccggagggagaagcatgccatcttattaactgcaactttacttcaagaaatcacgcatttgacctgagatcagtatgtcctgtatctggctgcaatctgcctcctcccctggagcctagggaatggctgactctcatgcttcttgccctggatgaccaaaggcccttggctaatattttttctgtgaagcgacagggttcacctgtgcaagagaggacagaggcatctaagaagatttccaatcccgcctgcacatggcccttctcctgcctggaggccggtgtgcagccctgcctggggggagaggaggcatcagagggatgctgaaggttcctttggatcctttgaccttttcccacatagactctttttttgataccaagactaatgatctggtaaccctccagaaaggcatccaggaacaggggcttaattaggactcatttataggaagctactgcatatgcagttccagccggtttccctaagggcccatggaggagatgacggggaggtgacgtgggtcaagatttagactctccctttctcagaactgtctcctatatcctacctggttcatgcttcccatgctccacctcaaattttaaacaaagcaactgctgactaacctacatatctttattaagaactacccaccttagcctagggagatgcatatttagcattgtgattatttggggttagctattttcttcttatgaatacacatgaggattttccttttcctcgtaactttgttatggtggctgccttgctaataagggttgtgcctgtaaatgcattttacttccataattattgggggatttacatgctctctggagatattaactgttctgatgtcctgtgagtaggcagtggtcaggagcacaagcccgtgaagaatccgtggatggaataacactgagagtttgcaagttcaaatctgagccctgcattttgtccacaacgtagttaacttgatgtaggcatcccgtctactttgcctgatggaggaagggaaggggtgtggtttattttgtctgagcacaggagagctcaggattctgataggctgttgcagggatagctgggacatctgagaacagtcacatttgaatgtttcagaatatttcagaacttgatgcctggccaacttcaatctgctgcctgccttcttcctcctctgccagattctccatcacacccttgccggggtctgaatgtgtatctcctccccacaaggtttcccatcttcagtctgattacagaatattaccactggaaccaggtgcttggaagtcagtgttagattgagaaatgtatgtcacgtacctgagtctttaagggagccattagtttttgatcaggcgcaaattaagtagaaaatcagaagcggcaaagtccttctggaatctgctctgtgacaaatttcttgggcaaatctcagaatcccccaaattaacaagcatctttcaaagtaaattgggccatcctccccgctccaaatcatacagaacctgagcacttctagacaactatctgggcaggaaattgtatgagagcacttttccctctcccgcccttccaaggaatgtataccagtataaatcaagacgtcagcatgcaggaagtcattgcagatggctaattttactccttcctcctacacttcaaatccacttgcttatctgatgcattttacatgtgagatttatttttccttctaaattttaaatagttgttgaatattgagggaatcatcagcttaagatcagggactatatatcttcctgctcttgtttctactttataaccatgaatgaagtagtctgcaaacagaaaataatcaataacaagatctacttttgctgagcatttattatgtgccaggaattgtattagatgccctacatctttgctacacaaagtgtggtgccaggactatcagcattttcatcacatgggagctttttagaaaggcagactctcaggccccatctcaaagttgaacaagattcaacatttgaacaagatccttagattatacatatgcatattatagcttcaaaggtgctgctttgcatcctttcacttattacttagagtaactctaggatgtaggacctattgcaccactttatagatgagaaaactaaggctctggaaaattaaacaagttgcctaagatctcaccaactaagtgtctgataggggatttaaattcaattttctgtttctccatattccatgcctttctagttctgctatgatgagttagaggagaatccattcatagtaaagattcagcacccccaaacatctgcattctctaagttttgaagttttctagaataaggctgatgtcgttaaactgtttaaaggtgtggacctgtaggacctctactagtgtgtgtagttcatttattcattcacacaaaacatgctgttgttgctgagcttcttcctattggtaagtggtggcatgataggtgcttccaggggcacaaagtcgactaaagggcttggtgcttgcctggaaagatgtttgttgctgacagtcgtgaaaaagctagcagccccgagaccatgagcgctttctgatgtcaactcagaatccgcaaaagaggcaggctgcctggaggtcaacaaatccaaactgacttgcaggtaataaagtatctcgttctgtctgcattgtcagtcagggtgcagcaccttccatctcttatctaggaagggaactgtagacagcaattccagttcctccagtgacatcagcagccagactctgcattccagcacacattgctcataagtagggtgtttccatttccccgaggcttctttaggaggaggctacaagtggtgcccacctgaccagctggttagggaggtaaccctgtgtgtttaacttccacttcaccctcccttctgagtggagaatgagcttgaagctgccatgcaaataaactctaatgactttcttcttgcatttacattattaggcgttcctttgactgacgttatgatgataaatgaaaaatgccttgcaccattacatcaagcactaatgcagaataggaagaatttctgctctctcacttattttagggaaagaaaggaaaaaaaagaaagaaaatagcagatgggaaatcaattggatccctatgtcctgctaaggtatttgcatacaggctgccaggagctcagtgccactcacactgcactggagacagggtctgtgtctcttccttgcctcttctgtactgcaaagtctgtgccagctgaatttcagtttctcagggatgtacgaaccacttagacccatttgacaggcaggcaaactgagttatgcaccttcctcaagttatttcagataaatgcctggaggatctgattgacctgtgaagcagcatgtttatctcagcaggagcatgctgataagttaccgtctagtttgcaattgcttagttgttttttatttcttttcttttcttttttttttttttttttggcgcaatcttggctcactgcaagttccgcctcctgggttcatgccattctcctgcctcagcctccaagtagctgggactgcaggcacccaccaccatgcctggctaattttttttttttttttgtatttttagtagagacagggtttcaccgtgttagccaggaaggtctggatcttctgacctcgtgatctgcctgccttggcctcccaaagtgctgggattataggcgtgagccaccacgcccagctttttttttttttatttttttattttttttgagacagagtctcgctctgtcacccaggttggaatgcggtggctcgatcttggctcattgaaacctccgcctcctgggttcaagcaattcttctgcatcagcctcccaagtagctgggattacaggcacctgccaccatgcctggctaatccttttgtatttttagtggagacagggtttcatcatgttggccaggctggttttgaacatctggcctcaagtgatccacctgccttggcctcccaaagtgctgagattacaggtgttagccattgcgcctggctagttgtctccttttaatgtgatatttgatacctcttggagtgtttgtttttggtttaggtgggctgagaaataattcaaatgaaataactgatgtgcaagtttctgtgcaatctctggccatagtttcccaaaaacgccctatagttcctgccgcgagttacaaaccctcacacctaaacagtttggcttcaggtgcctcaatcaatagcagctctttgatgttaaggctcaaagacactaaagcaaataatatacacattaaaagcccaacaacatgataacgggaacttagaactctgagagaggaaaaagtccaaaggcttccctgaagccagggtcgaatattggctatccttcacaatcactaaaacaacatattgataagacacagccaagttcatggtttctggcactaaggaaagccccacacctgcatagtgtcagtagtgcctttgagggagaagggcaaagcaggatcacttaggagattttgaagcctggtttaaggcaagtctctcaatgcaggagctagggagggggctgatcagtatctataggaatcatgatgtaatcatgtaggatcactggatataaagagtttgggggtagaaactgtcctttaattttttttttcttttttggtagcttaatgggtctttcggtaagttcttgggaggaacaataaagttatttgcaactgttatcttcctgggcagtagtagagttgtgttgaggaagacagtaaaatagtcaagacttgttaatgtagctggtaatgtgtgcagaaatcttggactctcaccaggcgagacatgaggctgatagtggtggagatgctttctggaggtggtgaccaatggccacgcctgctgggaggttgccagtgtcccactttgggaggcatcactgagggctggggggtctttgaggcgtatgcttcaagctccttgtcctcattaggccaagaggtcatctttcccttcagattcttctcaaccttgctgaagactcctagtggccataatctgggtgtcaggatgaagtctgggaactgagtgcacatccctgattccatacacacatttctttgtggaccccttgagtgaggaggacagaaatcctgctccaggacagtggtgggaagggtggctgcacaggggttaagagccatgggaagccagtgcatccccacaagggcacgaccctgagctcctccacacacccgaggaaccctgcttttagctcaaaggagccccgtatgctgtggagaattcctctgctaccagcctctgagaagttgtactgagcaactgtgaataagaaacaattaaatttgctaaaggtctgcgaaatcagatctaatctctttggggacttggaaaaaacaagcaaacaaaagagctgagttatcgattgctgcatttcggcggctcttaatctgaaatgaaatcaggacccaaaggccagagaccccgatatccattctgcacttgtcggaaggcccacctgtcagagcccgaacttctgctcaatggctaaattagtaggcaagtggcaggttgcagagagctgtggccattgggctttcttggggcacgaaagcggaggaagagctggcatattttcttaagtgtaaagcagtggagtaaattgagttcactgggtcaacattcctcctcctctatccacagaagcacctcacccaatcagcagactttctctccagccttagatctccctcttatgagatgctgtcattctattatcctcccccaagttggtctttacccctttgaccttcagaggtggagagggcaggagggcaatggttctggtggtcaggggcttgccaggaaggagaaagatgctgaccttgaataaacgacatatgtagctttcctgagttaggttgcatctgggatgcagtgaaaggtagcagcagtctcgctgtggctgtccagtccagaagcagaagaccggcacctgagatatcaaggtatccaatttgggaatgctttttctgtgggtgtgtagaattgcaggaaagaccatagcatattccctgaagtgaacccaaataaggtctgggataaaaaatctgaatctttaggcattaactgtgaaaatgtctagtcagaatgtctttaaaatggcagcttctcttatcagtgtatttgtgctgagaaaaaaaaataagtatagcttctcagtttaccttctctgatccagggacaagaaagaagaaaatgaccactacctcttcttaataagaccccttgatctctacactctccagaaaaccacatcaggatttacctcacagggtggacaaatctgaaacattctaaataaaagtttgaaattcccattttgcagtaaatgtgactgggcctcccttaatgcctcctgtccctcggtgttctacctgtacttcccacttcacctggtgtctcagctaaacttcttgaaagtgggtctctaagttttcagttatcgtgtattacacagttcattgcaaatcaacttccatcaggacatgtgtcaaggtcaaccatgaccttaccattgactcatcttttcatttcttcaacacagttgctttgaagggttggcatgatgggcctccatccttgaagtgctttgcaatcttgacccccaggtcgctgtattcctctgctcctccttctgcctccgtgaaaacccatgtttgcttttcttcttttctctgagctaatatcgatatctgttgaggtttcatccttgtctctcttttacatgtcgacataccatctgggtgatctctttattacatgacttctactctcagtttcacaaagatgactctgaaatttacatctttcaccagatctctcccctgggatcgaggttcatgtttccacctacccattaaacatgtggacttgaatatgcaagaggcctctcaaactcagtatgtagaaaacgttattctcaaaccttctcctccccttgatgttattattgggatcgatagcatctcaaccacctggcggcccaagctgaaactgttggtacgcctgtcactcttctctctgcccacctccttattcagtgtaagttcacacttcttagctgagcacgtgaacatcaccgtaagttggccaaaactgcctttccaggctgcacctgcatccaacctgggccagttttctacacttgcatatttcctccctacttcttgatttatctacatatatctactatgtgtggcctctttcctcttccatgccctcagtgccttatcctatgagacctgctttggatggtggccctcttgcatgccctctctattctcctcaatggacctggccacctcctcgtggtcactcccacacgacatgcttccccctctttgtgtcacactgtgtgtgacacatctgtcttcatcccctagacttgaggaaagaacaggaagaaattaatactttaatctttgtatcatttcaacctcttagcacaatttctgacacatagtagagcctcaaaaaaacctggcctgataattgaataaatgcttggattagaaataaattctgggggtgatggctcacgcctataatcccagcactttgggaggctgaggcgggtggaacatttgaggtcagaagttcaagaccagcaaggcccacatggtgaaaccccatctctactaaaaatacaaaaaaaaaaaaaaaaaaaaaaaaattagccaggcctggtggtggttacctgtaatcccagctacttgggagcctgaagcaggagaattgttcgaacccaggaggtggaggttgcagtaagccgagatcgtgcagctgcactccagcctgggtgacagagtgagactctgactcaaaataaataaagaaattctgctccagactaggtgagtcataaaagtatatatggttctaccacagagccctcacctgagaactggaaggtggtgatgctttgcgtctgatttttaagggattgagggatggtgacaagaaaactgaaaatgaacgttgtgattccctaagcctctcaggagagagatgccaagggagggggtagctgccttgtaaaagagttcaaagagcataggagaaatggggagaacacctgggttctccattccttcacagtgtgcacaaggaccccccgcccagcctcagggttctatttgtaaatagggtcaagagacccactctaccaggttgttgcgagaactcagtgagtgccctaagtgttttcacagtcatttaggaacccagatttgagtgtcattactttttagagcaatcatctgtgatgctaatgataatgatgcttgtgaaaaaaataagaataataaggacaaaaagtgacacacaaataaatagctgtttatctcgcataggagtggggaaacaaatgaaaatattggagaacaccagagccacttaaattgacaactctggtgtttccatatatgctatttgaacacatccagctgggggtctctcgtgcaaacaaatggtaaagaatgcatttttttcctgtctccatatcaccagggttttctgctcacacagtgttgcgctaattgcatattcagtaggatttataatgcaattatgaattcataccataaacgtttcctggtctcctgaaatagcttgcatttccttcagatgtgtcccaaggcactctgatcttacccttattatggcactgacattgtaattgttggtttacttctcagtctgtcccaaatattattggagctttaggacaggaactgtatcttgttcagtatactcctgttacctagtgtcgaatgaagcacttaagttttgctccaaagctatttgctggcctttactcattcattaaatacctatttgtggagtgcctgtcactgtgctgggcgctgggatatggcagcatcaaccatgttcactcacagagactatagccaggaagggagtggccatacagaattatttaatgaacgctgtaataattgcaataaaacaaaaatacaacatgcttaaggcatgtacaagggtcccaaccatgtgtgaaggcataggtagttctttgagaaaagtatatttttaaactatgaggaagacttatccatacaaagagttccagggatgggggtggagctaggtgggtgaaaggaagaatccagaatgactgaagagcagaaaatctaggatgggaaggtatatggactgctgtgatggccacacatctgaaatccagggaggtatgaggacttgctttctccaggttccaagtccattaatagcagaataaggactggaatccacagctttttctcctgggccacactgtaaacatacagctgtggttaggaaaacgagaggaagccttgagtgatgagagagtgacagtgggcaaagatccagactgattacacaaagggaagaggcaagttcaccctgaaagttgcatcatgttcagtggcactccatgcttcttcctgagccctggcacttgtgctgtaccttatcacagcactccagcagggctgacaggtcctctgccccccaccatgggccttgcctgttttcctctgttggagggtctccctgcaggctacagcagccaggacctttctgggccacacagtctgaatgacctgctcttcctgaatgctctctcctggcagcgttctgcgggctgccgccctaatagcctgtctccccacaggccccaaacatgttgctggatcagagttagtatctttcccacccgccaggctgtcccccgagggactgccgtctcctgcaagctgtagggagatatgctacggtgattcatattagcttgatttgcagccgttccacacagtgtcgcagagacctgcaaaatccccacagtcttgattaggtttgccttttgctgtttatcagtggtacctgtctatttttatagccacccttcagccaaattcaggattgcagctttcacggtgggaatcattccctggtcatgtgcatctctcattcgggtgtcttgtgggcagtgggagaggaaaggaaagcagaaaggatgcccgaggggaaggtatttgacattgtgagggctgcttttctggtgagggcaccggtccttggtattctcttcctggccaaaacatctccctccttagacccctcacatacttaaacttagttgagttggtgggtggacaagatgacaggcagatgatgagataaaaagataacattaagcgcattcccaaaatgccagaatctctaggcagaatgccaagttgtcctctcacccagtgcccacctctgcatctcaggttaagagagtagcccaggccagtgatctgcttacctgcttccctccacaaggaagaagctctgggcagcagagactctcgtgctcatgagccatccccagcccccgtgtggctggcccaacatcactcatgattgcagtaaatatttaccttctcatctgttgctcacaaccaccctggatctggataaagtcattttggcttctatgcccatttcacagatggagaggtgaccctctcaaggttacacagagcctggagccaagcgtgcatctcctaatgtcacagccactgggtgagggtctccttgttatcccaacccagctcccagggagtttcctcacagtccagcaaagaatcccactccctacccctccccatcagacactcccccacacccaaccaccacgcaaacttccctgtttggagtggtagagggagggatgataaaaggtataaaagaatgaaacattcttatgtttgatgattcctatttgatgaatgaaaacaatatttaatgagtgcaggaggttttgaacctacctaaaatggagggaagatttagccctctgcatttccaagacctcatctttgtcctgtgtgaattcttaccattaatagcaaaattgcagacagggggagtactacattcctccttaagaagagaatgccattgttgacatgggaagatggttcttgagaaggggttggaggtaggcaagctcatttgttctttattccccgccagtccgtgaggaaatgtcagacaacaagacctatcccttcatggactccatagtttagtgagggaaaaggatattaagtaaataattatctcattacaaattgtgatgagtgctcagtagaataagtttctgtgtgagaaactgacagaggatcttctttacattggaggatgttggggaagacacctttgaggaagtgacagttaacctgagatgacaaagatcaacgctgcctggttaagtctggctaatgaattgttcaagaccacatggttaggacaactgagacacagtacagtggggctgcggggactaggggtcagaggacctcaagtctgaaacttaaaaaatcgtgtattttttgtgaaaataattaaatatcaatagtactacaagtgtaattttcaaaagaaaattgactttactctcctcatccaagaattccattctccaaaggcaaccattttcagctctcacctgtttatttggatatttacctccagatttctcagtaatgtgtttatagagttacttcataaattctagacattcatctactacaaaagatgaagatttagcattcttttttttttttttttttttttttttttttttgagacggagtctcactctgtttgcccaggctggagtgcggtggcgcgatcacagctcactgcaagctccgcctccctggttcatgccattctcctgcctcagcctcccaagtagctgggactgcaggcgcccgccaccacgcccggctaattttttgtattctttttagtagagacagggtttcaccatgttaggcaggatgttctcgatctcctgacctcgtgatccccccgtctcggcctcccaaagtgctgggattacaggcgtgagccactgcgcccagcctagcattcttaaacctgtcccatcacatttaattcttccattttcctaatagatagttttacatgacaattattctttgaatcaattgtcagtattcaaattataaatattaatgcaaataaaaccaagtgaattatgattacattgactttcctatacaacattctgtttttcctggagttacgtattttctgtgtatgtctattttttccccacagttttcccattttcctgctgccatctggaactcccatcaccactaaccaggcctctctcctattttggaatccctgcctccagggcctcatgactttttatttatttattattatgattatctttaaatttctcttgtgttttggaagagtgtacttttcagttacttcctgaggaaagggtaagcaacttgcttcacacatgactgttagtttgattgggtttagaattttcacctcagagtagttttccttcagaatgtcctctattctctaacttccatggtggctctttagaaatgtgcctctctgattcctacatctttgtatgagttctagatatttttttttccttaggaagattttaggccactctttttatccctgctattttggagttttcttaggtatacaaggtgttgatacagactttttaaaaaattatactttaagttctagggtacatgtgcacaacgtgcaggttgttacataggtatacacgtgccatgttggtttgctgcacccattaactcgtcatttacattaggtatttctcctaatgctatccctctccctatccccaaccccacaataggcaccggggtggtaggttccccgccctgtttccaaatgtctccattgttcagttcccacctatgagtgagaacatgcggtgtttggttttctgtccttgtgatagtttgctcagaatgatggtttccagctgcatccatgtccctacaaaggacatgaactcatcctttttatggctgcataatattccatggagtatatgtgccacatgttctctatcatcgatggacatttgtgttggttccaagtctttgctatcatgaatagtgccgcagtaaacatacgtgtgcatgtgtctttatactagcatgatttataatcctttgggtatatacccagtaatgggattgctgggtcaaatggtatttctagttctagatccttgaggaattgccacactgtcttccacaatggctgaactaatttacactcccaccaacagtgtaaaagcattcctatttctccacatcctttccagcatctgttgtttcctgactttttaatgattgccattctaactggtgtgagatagtatctcattgtggttttgatttgcatttctctgatgaccagtgatgatgagtgtttttttcatgtgtttgttgactgcataaatatcttcttttgagaagtgtctgttcatatcctttgcgcacttttcgatgaggttgtttgttcttttcttgtaaatttgtttaagttctttgtagattctggatattagccctttgtcagatggttagattgcaaaaattttctcccattctgtaggttgcctattcactctgatggtagtttatttcactgtgaagaagctctttagtttaattagatcccatttgtcaattttggcttttgttgccattgcttttggtgttttagtcatgaagtcctcgcccatgcctatgtcctgaatggtattgcctaggatttcttctagagtttttatggttttaggtctaacatttaagtctttaatccatcttgaatttatttttgtctaaggcgtaaggaagggatccagtttcagctttctacatatgactagccagttttcccagcaccatttattaaatagggagtccttttcccctttcttgtttttctcaggtttgttaaagatcagatggttgtagatgtgtggtgttatttctgaggcctctgttctgttccattggtctatatatctgttttggtaccagtaccatgctgttttggttactgtagccttgtattatagtttgaagtcaggtagtgtgatgcctccagctttgttctttttgcttaggattgtcttggcaatgcgggctcttttttggttccatatgaaccttaaagtagttttttccaattctgtgaagaaagtcattgggagcttgatggggatggaattgaatctataaattaccttgggcagtatggccattttcacaatgttgattcttcctatccatgagcatggaatgttcttccatttgtttgtgccctcttttatttcattgagcagtgatttgtagttctccttgaagaggtccctcacatcccttgtaagttggattcctagttatttgattctctttgtagcaattctgaatgggagttcactcatgatttggctctctgtctgttattggtgcataggaatgcttgtgatttttgcacattgattttgtatcctgagattttgctgaagttgcttatcagcttaaggatattttgggctgagatgatggggttttctaaatatacaatcatgtcatctgcaaacagggacaatttgacttcttcttttcctaattgaataccctttatttctttctcttgcctgattgccctggccagaatttccagcactatgttgaataggagtggtgaaagagggcatccctgccttgtgccagttttcaaagggaatgcttccagtttttgcccattcagtatgatattggctctaggtttgtcataaatagcttttattattttaagatacgttccgtcagtacctaggttactgagagtttttagcatgaagggctgttcaattttgtcaaaggctttttctgcatctattgagataatcatgtggtttttaacgttggatctgtttatgtgatggattatgtttattgatttgcatatgttcaaccagacttgcatcccagggatgaagctgaattgatcgtggtggataagctttttgatgtgctgctagattcgatttgccagtattttattgaggattttagcattgatgttcatcagggatattggtctaaaattctcttttttttgttgcgtctctgccaggctttgctatcaggatgatgctggcctcatgagttagggaggattccctctttttctactgagtggaatagtttcagaaggaatggtaccagctcctttttgtacctccggtaggattcggctatgaatccgtctggtcctggactttttttggttggtgggctattaattattgcctcaatttcagagcctgttattggtctactcagggattcaacttcttcctggtttagtattgggagggtgtatgtgtccagaaatttatccgtttcttctagattttctagtttatttgcgtagagatgtttatagtattctctgatggtagtttgtatttctgtgggatcggtggtgatatcccatttatcattttttattgcatctatttgattcttctctcttttcttctttattagtcttgctagcagtctatcaattttgttgatattttcaaaaaaccagctcctagattcattgatttttttgaaggggttttgtgtttctatctccttcagttctgctctgatcttagttatttcttgccttctgctagcttttgaatttgtttgctctcgcttctctagttcttttaattgtgatgttagggtgtcaattttagatctttcctgctttctcttgtgggcatttagtggtataaacttccctctacacactgctttaaatgtgtcccagagattcaggtacgttgtgtctttgttctcattggtttcaaataacatctttatttctgcttcatttcgttattttacacagtagtcattcaggagcaggttgttcagtttccatgtagttgtgtagttttgagtgagtttctgaatcccgagttctaatttgattgcactgtggtctgagagacagtttgttgtgatttctgttctttcacatttgctgaggagtgctttactttcaactatgtggtcaattttggaataagtgcgatgtggtgctgagaagaatgtatattctgttgatttggggtggagagttctgtagatgtctattaggtccacttggtgcagaactgagttcaagtcctggatatccttgttaaccttctgtctcgtcggtctgtctaatattgagagtggggtgttaaagtctcccattattgttgtgtgggagtctaagtctcttagtaggtctctaaggacttgctttatgaatctgagtgctcctgtgttgggtgcatatatatttaggatagttagctcttcttgttgaattgatccctttatcattatgtaatggccttctttgtctctttttatctttgttggtttgaagtctgttttatcagagactaagattgcaacctctgctttttatttgctttccatttgcttggtagatcttcctccatcccttaattttgagcctatgtatgtctctgcatgtgagatgggtctcctgaatagagcatactgatgggtcttgactctttatccaatttgccagtgtgtgccttttaagtggggcatttagcccatttacatttaaggttaatattgttacatgtgaatttgatcctgtcaatatgtcagctggttattttgcccgttagttgatgcagtttcttcctagcattgatggtctttacaatctggcatgtttttgcagtggctggtaccagtttttcctttccatgtttagtgttccttcaggagctcttgtaaggcaggcctggtggtgagaaaatctctcagcatttgcttgtctgtaaaggattttatttctccttcacttatgaagcttagtttggctggatatgaaattgtgggttgaaaattcttttctttaagaatgttgagtattagcccccactctcttctgacttgtagagtttctgccgagggatcctctgtagtctgatgggcttccatttgctgttaacctgacctttctctctggctgcccttaaaattttttccttcatttcaaccttggtgaatctgacaattatgtgtcttggggttgctcttcttgaggagtatctttgtggtgtcctctgtatttcctgaatttgaatgttggcctgccttgctaggttggggaagttctcctggataatgtcctgaagagtgttttccaacttggttccattctccctgtcactttcaggtacaccagtcagacgtagatttggtcttttcacatagtcccatatttcttggagactttgttcgtttccttttactcttttttctctaaactttgcttcttgctttatttcgttaatttgaccttcaatcaccgataccctttcttccacttgatcgaatcggctgttgaagtttgtgcatgtgtcacgtagttctcatgccatggttttcagctccgttgggtcatttaaggtcttcttcacactgtttattgtagttagccattcgtctaatcttttttcaaggtttttagcttccttgtgatggattcgaacatcctcctttagcttggagaagtttgttattactgaccttctgaaggctacttctgtcagctcatcaaagtcattctccatccagctttgttccattgctggagaggaactgcagtcctttggaggagaagagacgctctggtttttagaatttttagcttttctgctctggtttctcctcatctttgtggtctttatctacctttactctttgatgatggtgacctatagatggggttttggtatggatgtcctttttgttgatgctgatgctattcttttctgtttgttagttttccttctaacagtgaggtccctcagctgcaggtctgttggagtttgctggaggtccactccagaccctcttttcctgggtatcaccagcggaggctgcagaatagcagatattgcagaacagcgaatattgcttcctgatccttcctctggaagcttcatcccagagggtcatctgcctgtatgaggtgtcagtcggcccctactgggaggtgtctcccagttaggctactcgggggtcagggactcacttggggaggcagtctgtccgttctccaagctcaaacaccatgctgggagaaccactgctctcttcagagctgtcagtcagggttgtttaagtctgcagaagtttctgctgccttttgttcagctatgccctacccacaaaggtagagactacagaggcagttggtctttctgagctatggtgggctccacccagttcgagcttcccaggatgctttgtttacctactcaagtctcagcaatggtggatgcccctccccctgccaggctgctgccttgcaggttgatctcagactgctgtgctagcagcgagcaaagctctgtgggcatgggaccggcctagtcatgcacgggatataatctcctggtgtgctgtttgctaagaccattggaaaagtgcagtatttgggagggagtgtcccgtttttccaggtaccatctgtcatggcttcccttggctaggaaaggaaaatcccctgaccccttgagcttctcaggtgaggcgatgccctgccctgtttcagctcaccctccatgggctgcacccactgtccaactagtcccagtgagatgaaccaagtacctcagttggaaatgcagaagtcacccatcttctgcattgattacgctgggcactgcagaccagagctgttcctattcggccatcttaggcttttttttttttttttaactactctcctttgtacttaatacatttctcttctatcagttttgaaaatgtatcttgtggtatttattttttaattttctcctcttattttcttgttttctttctggcagttttttaaaaagatgttttattattttctgtcatttatattttctatattttttgttctgatttctaggagagttctccaactttatcctcctatatttaaaattaatgttccttaaaaaaatttaacctataacttcttttaatttctaggagttctttattattctctgcttattgttatttatttatttttctgttgagaggtgggtgctaaaaagccctttggaagctctacacataagtttgttgactcaagggcttctctttaggttaagtgggagctacacattttggtgaagatccctcaagtgtcagtaattttttctgtattcttgtgggtggctttttcagagaaaacttccaatctgcttaagttcctccttttctgactctaccatgctttattaccaagtggttctcaaacttagacatgcatcagaatccctggggagcctgggacaacacagtctgctaggtccctgccccttcacactttctgattctgtaggtcttggatggcccctgaaagtgcatctctaacaagttcctgggtgatgatgattctgttggtttgggaactacatttttgaaaaccactactctagagaataagctctctatctcttcccaggaaagcagtttagctctcaggttccacagatgagtgacggaatgtaactcttcctcatacagactttcaacagttgtcttgttttttgtgccacccctcaccacagcctccataaaaaaaaaaaaaaaaaaaaaaaaaaaaaaaaaaaaaaaaaaaaaaaattcatgcccgtgtctgggggtttgcagcctgaatcagcttgcttctcctccccaggcatttcagtttttgctttccctgctttgctgaatcagttaccattcattcatctgctttccatcctatacaattttgccaacgtgtttcatctgctgatgttttctctcattttatttgtctatatagattgtttaaaccattgttttaaaggggtattgggaggaagtagaagttaatccagttcttcaggccactgtaattagtcatgtcaggaattattttgattgcaagccattgtctttctttcctatattaagcacagctctttttggtcatgcagttagaatgagctgatgcgtctccaaccaaagcccagagaccgtgaatgtgccattatcctaatcatgcaaagcactctcatttctattcttgctgagggaggaatgcttcccagaactaaattcctaactacggaaagaagaaaaggcagtttgagaatttcttgactgtttggaaattttttctagcacaacaagctgtttatcctttactctgattcttattgaattaaggaaggagaaaagaaatcaattcactctccatatgctgcacagcaaaaaccaccactcacaacactatggaatatgtagggaaggggaaaagaagataaatccatcaactaacaagataagtgccttgttcctccatctgttactgctgtgtccttatctaggattggagcatggcagctccgatatatctcgtgtcaggtattatattccaaacccatatgaatgaattttcatgctagtaaccatccatgatctagcccagccacagctaaatttgtcctaaggcaccaactgtcttttgcatttggaagtccattgaattcacagactggaatagggttgtctgctgctgccagaggatggtatctctctgtagcttttccagcacggctgtctctgttgtgctagagctggtgctgatgacttacttgattcactcctgaggaagtgctgatgttcttccaggagatagggaaaacactggaggcctggagaaaatgtctatagaaggcccatagatgggtacatcaacaagagattgaatcattatttaggtgattgattagatgcaccactcctcagatcacagggtaaaaattcagaagactgttcaattggaatgatatctcacgctcttcagcagccccaattatgcggagatgatttcctcattcacaaacagtttattttcaggactgagccttaactgagcatccaggtgcagaagcggagatgatgacatgtggcatgggaacccgtgattgtggcatttttgacaagggctgaaagtcgcagtagacagataaaacttgtttgcatccgtggttgagactgagactcacattttattatagcaattgtgtgatccatctatgttaacatcactgtcttcatcatcctcctcatcgatgacagcaatagcagcagcagcagcagcagcaatacaacagaggggacatgacagctttcagtgcatggtcaaattctttttattttattttagattggggttgtacccatgcaggtttgtgtcatgggtatattacataatgacagggattgggcttctagtgtacccatcaaccaaatagtgaacactgtacccaataggtaagttttcaaccctcatccctttcccatcttccccccttttggagtcccaagtctctattagttctgtctttatgtccatgtgtacccattgcttagctcccacttataagtgagaacatgcagcatttgactttctgtttccgagttatttcacttaggataatggcctccaggtcatccatgtcactacaaaggacataatttcatcgttttatggctttatagtattccgttatatatatacgtgtatatattatatatatgtgtgtgtatatatatatatacacacacagacacacacaaacaccacattttctttatgcaatcaatcattggtggacacttaggttgattctgtgcctttactattgtgagtagtgttgtgataaacacacacgtgcaggtatcttttctatatataataatttcttttcctttggtagatgcccagtagtgggaatgctgggttgaatggtagttctatttttagttctttgagaaatacccatactattttccatagaaggagatattcttacctgtttccatctccgtcttcagaacttgagggcatctaatacacagtacgtgtggtgagctgaacagggtaagctagatttgctgcagtgtttaaagagagatacaatgagtaactcaactttataagtggtagagcactggaaagaagggaaatgggttgaaaatatttagtaacaaaattcaacaatgaagactggccatattgtaacagaataaagaagagggaaagaagaagcttgtcttttccatttcaagctagaatgcctgggtgtatggttgtatcatatttggagaataagagaaaagtcggtcatattgcagaagaaaatatattttcttggaatatactgagattgaggtgcctgtgaatcatccagagaagcctgtcctgcaagtagtgagtacatgagtcaaactcaagggagatgcccaaggctggaaatatatgcatcgagccatcagtgcacaggtggtgtggtaggtcacccctaagacagtccccagtggtccccattgactgatctccatgccctgtgttattccctttcctaactgtgggctggacttatttattcaattttaatgagtagaccacagaagcagctatgggaactcacttccaaggttatgttataaaagaagagtgacttccatcttaagatgtctttatctgtccttcttgaatcacttgccttggtgaatgccaacttccatggcatgaggtgtcactgtgcagagacccacccacctgccaaggaaacaaggcctgtaagaagcatgtgaataagcttggaggaagatacctccatacctacatttgagtcttcagataaaactatagttccagatgacatctttgctgcaacctcataagagatcttgaccagagacactcagctaagcctcattctgcttcccgacctacagaatctgtgagatagaaaatgtttgcgttattaaattgcaagttttacagtgatccgttacaaagtaatagaaaacttacatagttagttaaaagaatgagaatagttgagagttgagctcatttaagaaaaggtggtagagaaagggaagtcaaaccctgatgctcaacagtggctaaaggttagaaccaaaaaaaaaaaaaaaaaaaaaaaaatagaagccaatatgggggacagaaagaagaaatggaagaaacaataagaatgaaatgagaaaaagcaggggcaacttgacattataaaagtccaaggagtgcgtcttatggaaagagaaagaaaagggatcagattgctcatatcaaatgctgcagatggttcgagtaatacaaggtttgaaatgacctacaaattttgcagttaggaggtcttgggtgatctgactaaaagcagtttcaatagaatagggaggatagaaactagagagttggggcttgagaaatagaaagggaaagagatcatggactatgttttgagaagaatgaattgaggaaggaaggagaaagattggatggtgaagaaggtcatggcataaattgagggctttgcatggaaggttcttgaatgtgtttatgactatactagagccttaagaagtgtggttgtggggggtgtggcacagaacatttaggttaggttaaagatgaccaacagaagaaagccatgatacagaaagagtggagaagttggggtcaaggatacaagtggaatcagttgatctaacagggctttctgttggctaagactggagagaagatgtaagagaaggttatatgtgggtacaaatgtgtttcctggaaggatgatgagaaatagtgagattacattagaccttgattttctcataaaatcaggaaaggggtacgtatcaaatcagtgcttctcaaacttttccataagtaaatatcttaatgagagagaaaagtaagtgcatatccatagcaacctgaagtcatagtataataccaagaagtcagcagcaatattggaatttcacatcaattattaatctatcctatttgtatgatgatccttattatagccatttttaatataaaacattttgaattagtgataatatttaactttcctcccaaatgattagagcacactgcatgcttctgagagctgcattgtatttctcctgtggcatttgtatctccgtacactgccctgtacccctaagggtatgtatacagccatgcagagacccagctttacactatcagcacccactgacacatttgcacattcagatttgagattcatttagttctcattggtcaccttaggaagcacagtgcatcatctgaatgcatgaatgagaaaaggaaaattcacttttagttgaagagatgaggtgagaaagcagataggcaaagaagacaagacctggggatcactgtctaaactgggtagacctgtttagcataccagagatagggctgtgaccttgtggggtgtgacagatgagctaaccaactttgaggtcagagatggcttgtggtaatcagtcccagagtgtgggagcaggagagagagacatggaagtgtttagaggtgtactagtgtaagtgaccaggacacatgtgacttgcttgtttttccaaatgatgagcctggcaagcattcacaattcctgcaagatgagatttatccaagtaccatccaaccacctttgcttttggggtgcactctattgtgagcccaattatttttttctttgaggtcaagggttagcaaactcagcaaaacccaccggtcaaatgcagcctgccacttattagtttctactggagcataacggtgctcattaattgacatactgtctatggctgcttcttccctacaaggatagatctgagtaattgtgacaaagacttgatggcctgcaaaggctaacatagttactatccagttatttatagaaatcaattgcccaccccattctagtttgacctatctcagcaactaaaacttccagataatttctgcagagttttcaaatatccaacttaagacatcacacgtcttaagtccaacccaattccccaagcctactggaggaagggctatcttatagatcagagatttcccagccttcatctgagccccacttaagtttggtgttgtgaggctatggaaatgttctgtgctgaaatacaatttgcattctggacaactgttcctattaccgtccctaggagagaacttcccaggcccggctcagcctcagggtgttttcccaaattcaccagcctgcagatggaaaccgcctgtgcattgtctcctttcacccttcccagctgttcttctcccaaatttcccttttctttccttttagaatttccaaaagagcacactcagagttttagacaaactctgttctctctttcttctgtgatgctcagtagagatgataaacagtactagttagaacattaaaaaaaatgaattcttcatataaaagggtttattccatccatcccacctaggcgcacattcgccttcctctgcctcccctttgaaatccagagcttcctggagtcaactgaaacaagagctcatggcctcacccacagcacttggatcccatgtagaagtcgtaagttcttctctgactcaaggtttgggatcaagtcaactctaagtacacatatgtatggccattgctgactacatgtgattcatgagggttaatgcagtttgtaagacccagatgacttataatgctcagcatacttggaggcctccatccttactgctatctagagtatttctaggacacatgtcatcatttgaataggtcccagctaaaagctggctgtggtccttcacagcgatcagaggagaggctgatggaaagcacatacttttaactgttagcctaactgaaaagaatgtcagaaaggaaagatagaaatggaatatgcatatgactgtgttaagacacaccaaagctggaaattatttttgctttgatagtctcctaatttacatgacccaggctaaggctgctgcttattagcatgggtcattgagctgtctgtatctgcagggagatgaatattctcctttagagcaacttccaggctttcaggaattgtatacggggatagaaccacatggttttgcgatggccaagagggctggttggagtgcctcggatgtgattttggacccccaaggttaggggagttacctcctctctgaccttttcctagccgctgcttctgtttatcattttatcttgtcagagttcacgtgctaaccatgaaataaagagaccccccttccctttgcttcccacttgggccctgatgaattttggttgcctcttcagaggctccgaaatccctgctctaatttcaattagagcgctccctgtggccgtgcaggctggggctgcagaatcaattcctaatccccacattagcactgattcatctctttcctgagctctagcaccggcagctctcgggagagggagggagtgagaattgagcaatctttcagaagaataaatatggtttgtttgtatttgtatttgtttccacgctgcattctgattgcatcccatgccttgacaccacaattattattaatttccccgtctgctcttcaattcttgctgccacaaagacgagatgatggataatgttagatgtggtaattggatgagttgggggaagggagagaagaggggagacagatgtttcattatgagattttgcatctccatttgggcctccagcacagaggcctgaaccgcagccgccatcatgcaccgcagatgagggctcccgtttggggcaggtctggcctagttctgcatctctgctccacttcctcgccttgtacttctgcgtcttgggcagtcggatttcacatccatttctggtgaacgctggaaagccagtaagatgaaacctagaaagctggacctggtggcttggagggttgcacccccaccctgccctgctgccagaccacatctgtcctgtgccacctctcagcacgtgtgcttccacgtgcgagtgtggtagccccgggtgagtgcccactctcagagatgaggaggctgggctacacgaggaaggagctcaacagactgtcctgcgctgaagccgctgcctttgtcctcccaccttgccctgagtgaggggttggagcagctgtcacagctgcaccatcttcttctctgcatggcatccagcctctctgttcaataatctgtcatccccaccaataatttttctgcccccatggactcatccccagggggttcactgtccctgccccacacaggccagcctcctgtccaacatgatgcaggctggcaggagcagtcctggctcttgaatacacacctaagcatgcagcctggcccttccagggaggccaggtggagtatttgctaggatgagatgatagacctgcggaccaggaagaccttatgggtgctcatggaactctcattcatgagaaaaccagcagaggctgcctcacttccaatttcttcttctctgaacagttctcagtccatcagtgcagagcacatggaaggaagaggctacctcaggccagagacaccgaccctgtccttgaggcactcctccaggttgcaggagagaaggctgcaggctggagaaggcctcgaagtccagcctctctgtctagggctgatgctgcctgtggcggccccaaccaacaggccagtgatgttggtgacccggaagtcacgacaagcctgctgcattccagtggctttcgacttcagctggactgtaatagagtgggaggaatggtggtctaagtcattttggggagttttgcagggggcatctctaaagcccctgcttctgtttaggaggaagcttttgtccatccactgagaaccctctaggagacagcagcaatggcctacaataggcacattcaaagagcaggggcaaaatgtggtggtgaagaagaagaatttggaaaacagagtcctgtgtgctcccagggaaggggaagaagggagggtctctggtgcttctgagctataaattggctcagtcaggttaggtgcttacatttatttttcttctcatcagcacggacaccgtggctggtaatggagctgccgtgcagtaactcatgcatgagattagcaacacagaaggacagccggggactgctggctgtaggcgggcatgggtgagaggaactggagggtgaccaggtgtggctgctcactcaggtggactcccacaggggcatggaggtgggggcttacattccgaatttctaggcaaggaggggaccctggagatcattacagtccagcttcctcgttgtgcagataaggagcagaggtccagtttgaggaagggacttgcccaggggtgcacagcaggctggtggcagagtgtgggctaggcctgagtcctgtcgtcttgcctgcagagggattatgctgtagggaggagagtgcctgtgatggctgcacagccagatggtgattccagcaccggccagatctgtgctgcgttcatctctctcatcaaaccctctcttctaattcctccgtgctctctctgttcttgtggtaatttccaccagctggcccttcagagaagcgtgtgtgtgtccagaagcatggaggccgcaggtgtactagctgatcctgtcctccccatgcaggactggagaggccttggaagcccagctcatgtcccacctgtgcactgcctgtgcagaagcctgtccctacgaacaggctccactgtcaacccactctgcttgccagatgaaaactgggtgagtcaagaaaaggcagcttctacctactcactccacttgttcgttccaggcaatgtccccatgtttactcacgcacgcattggattaggagacctggaatctgagatgtcccagcaagctttagctaaggtcatggttacctccatgaaactgctgctgtaagtgccacagctggagttataacgatttctctcctttcctgcaggtccctgcaggtaggctgctttcttttgtctcttaagtcactgccacttactttgtcctgcaaaataacttcccaaagactacactcccatgtgggccagtcttcccaggtcccaccttccctccttgtatttgctaactcctttcttggtcctcagcttcattgctattcatccagtagatgaggaagaaagacaatgtttatgcatggggtgaggaagtgggggagtcataacccgaagtggctcgtggcttccacccaccatctattggccagaactcagtcaaagaagagctgctattacccttgacagttccttgcagctgtcacttctccctgagcccattccgcctgggacccttctcccttttttatttgatgaatccccactctgacagcttccaagtcaggtcttggtttgaccccagggaagcctccctgaagtccttgtcctgggctgcttggccaaccatgtgcacgtaaaccctggactgcccttggtgccttcacactcttatgcatgctcctcatccatttttctgattagaccaccggcttctcaaggtcaaggtctcagttacatcttttattttctttaattttagtttttaacacagcacttcgtataatagatcagtggttcttaatagagattataacttacaatcactagtaggccttctaaaatatctgtgctgggctctacctctaaataattaaattgaaatctgtgaatgtagagtctagattttttatagcccaaatattcattcagggttatgaatcgtagtagatgccacagaaatgtttgttgaataaataaacctttttttttctccagaacttaggagtgcaaaggagacagggcagggcaatgggactctttctggggtcctcaaactctcttggacaagttatgcccatttcacacagtctatagacatcaaaattgatattaaccatttaaaagaatctttcaaatttgtcctgggtgctttaaatggaacagaacaaaatttccttcttctagtttcagaattagaaaaaaaaaggtatacatgccaagaaagaaaaataactaacaaatattttatcataagcacttatggaccaccaactctatgcctatatccaagtgggaccgtgagcagcatatgacatatagaggcttagattttcgagcttagccaggaaaccaagcatatgcacaaaagagaactgtatagatgagtattttctctggatattttaaagacacattacttagtacagataattagaaaagaagacagcataccatcaggtgctaattatgcagtgcagaaaataatgcaaaaggagtgagaggagggagaaattcctctgggctcatgtcttagagaaggctttgtggaagagcgagactgggggtgcagctggaagggggtcccatgcaggaactgctgtgggcagagggaagccttcccaggccagaggactctcatgtgcagattcagaaatgggcatggtcatctggacattttgtaagagatgggtatggctggaacaggtgtttagaggaaggaacatgaagtccaggtgtttgtggatgatagaccaaatgacagggaggctctagcggcagaggtgagatctttgctggagccacgagaactagtgctggtgtgtgatctggagaccctggggtcccccagggcttggagagctgactctgacaagggcatgagtgaaggagagatgtgaggaggagcacacacagtggcctgcaaggagaccatttgggctaccagggcatgaaggcatcaggctctggcccatgatggcagtggagggaggggcatgaggctgtgagagcctggccacctccagtagaacagccggcaaagcctgagacaccctcccgctctccgatgaccctggctcctctgggctgccgcccccttccctgcaccctgagcatcctctcctcacctgatcagaggccatttggaccctggatttgcacctggggcacagcttcctcgaaaagaagtggggggagggattgatgctattttatcaccatcaaggacttctgaatgtgtggagttttctgagtttaacgggctgagaaatggaaaggcatttgttggcagtgcctggactcccaaactgctgtgctgccgagcgccccgtggcctcccggctgcaggccccactttctctctgagctttgctgtggcacagacacactctttgctcacccacagtccattggtggtctcaggcagggagttcacctttgaaggcatcctctttttaaagcttgggaaaagacatttcccgtttcccgagctcagcacctccacagatggctacttctttctagagtgttctgaattaaaacaggccaggaggaagccttctgaaccaactgacatgtgtgtgctcatttgtaggaagaagttaatgataacttttttgccatcttgtaaagctatgtgatgatatgggaaaatgtcctctgcatgacaggtgctttgtttggagagccactatcgacatagacgtgtattttagtccctatgaagacactgaggctgaagggcttcttggctttcccaagactccacaactagttatggttcttggtatgagcccagcttctctgagattcctgagagctcctgcacccttctcctgcagtgcagacaatacttagaatcaggccacacaggtgctggtactgcctttgggtgggatttttatcgctcagatgactgaggctgctactttatttaataaactttcagcaggtgtgcagggctgggggcaagggaatggccatcttcatggcttggcagtcctttgggactgtggaattgtcaatgtcctgggtgataaaagcatgcacgactctggtttctttttctctggggccaattctcccaaaaccgtatttccaatggctccagctcagcagagctgtctgtccaaaaagcagagatatttcagggccatggatgctttctgaatctctaagtcctcccttcttgcccacaatgtcatctcaggaccaatggttgaggacagggattcagatcatcagcccccaactatcataggcagaggagaatccctcaaatttatgacagcaggagctcctctcagagatgggaggttgggacataggagaagaagaaagaaatgtcttctgtagaaaactcaacctctgcaacttccccgtatgtgccttcaaagagaggagaactcttgtgatgataatgagtaacagtgagtagtctgaattttttcatttttaggaggcttggggaacagtaactacttggtaccaacaaccctattatgaattaggccacaagtattattccctgcatgaagaatagagactacttttctctagaggtgggaaaagaaagagactacaaagcgacaagtacaacggaaagactttcattaaaaaaaaataacaaagaaaacacaagcaaacaaaagaagagtttatccaggaattagcaagtccacaaggagccttctggaatacccaccttcctggtgtattggtatattgtatgttggtataaaatatgcaatctaagtgaaagggaactgtctaaagttcccaaacctcagcttccacgtccatatggaaagcaggagccatttgccatctctaatgtttgctcagcattggctgcaggtatctgcctggggaggacggtgtgataactccaacatccacatgtccctcccacaccagcaggctcggggaaggagggctgaagagcctttaggtgtggggttcccacagggatgagcctgcagtagtgggctgggaagtgcaagctgggctgaacctgtctcccgtgcaaccttccagcatcatttccatctgggaccttctcatcaaacatcgctcccagtctctaagcacgtttatttcctcaatgttttataatcagatagagctcagctcacctgtaaaaggattacagcatctccccttatctgcagttttattttccatagtttcagttacctgcagtacagtataataagatcttttgagagggagatcaaattcacctttattacagactatgttataatcattctattttattatgagttattgttgttaatctcttactatgcctaatttataaattaagctttatcataggtatgtatgtataagaaaaaacatattaacctatgtggggttctgtactatccactgtttcacacacccagtggaagctgtggaacacatcccccttgagtaaggggggactactgtattcccttttctctcttaaaaacaaaatatttcctttcctccctatccttgtctctgaaaggccacgtgtggcaatggcaggcgtcccccaacacacctttacccactttaagtggagagcagagtccctacacactgctgcttcctgcgctttacagagctaggagagctagggccatactcagggattttgtcagtcaaggtaagggaggcagagaggcagagagcttatatccatcccacaaagcacacgtttgccggtgctataaatttaaggaagttgtcttcacaggcagtgtgtttgcatggagtgatggggagaggggcgggagcagtggagaaaggggcttgacttagaaattaatgacagctgcattacatcctgatctgtggacatcctccacaccctgatttgatattacgctggggccacagagagaagaaaaatcacctgaatatataaagcctgtatttggcatagtgtaaataattttaaatgaaactgtcaggcttaagccctgaaatgtgcctccagcaaaagataaacacacagaggagaaaggggttctatagggaggggggaagacatcacaatctttaatatttttaatcagtctgtcatctccaaacaggacacattgttgcagatacccttgtagactatacatttgctgattttgtgtgcgtgctgttcaacgcaagcatgatagttccatttcagaggctcagcaagacttaaaatctgcttggcagcagctgggccagtaaaagcatcaggtgctgtcaatgggtgactcagtaatcgacctgaaatctgcaactgtaatgcaacagctgcagccagccccgtgggttcataaggcttggccacaggtttagatgcaggaggtgttacgagtagacggcccaagcggaggctcaccccagaggctgtgcagctctctgaaggctgcagccccacctccgcacgatgaggctgctgctggcattcccactgtcagaccactgagctcaagttctggcttcaagcgctaaaaccttcctgagggcctgaccacaaaggagtagaacgatgaatcagtaagttttatcattttctcaaaggaattgttacatagaagacaatgggtccactgaggtagggggagaggctgagaagaatggagggagggtctcgaaaagcttagggagaaaggtttagcagtggcgttcaaagtcaaatagagatttgctaaagtccaggctcaaatagaggtctgagcccagggctggacagaggaattgtattatacgaggggtctggatgtgatccaacaggtctaagttctgaagcaaagcagctcaaggctggtggacatgctgggagtggtggaggccttgcaaggaggactgtcagcaaggcagcgggcatacctcaacttggcacgtcacctctgttgaagtcgaataaatatagagatgaatgtcttaatttgaaacattttatctgggaaacaagaattgcgttttgaggccgacatacagtgtggatggtctttggtatgtctgatgaacaaagagaaagttggaagttttataaaaaggagaaatgttattcattgttctgaaagaaagttcattggcactagcaaagtcttgacccatttgtgcctaggttgcaaattttgtgtgtgtgaaaaataagaccttggcggtgaccttgagcagtaggatataaataactactagcttagcgttccaatagtggagcactaggcataagttgattaaggagctggcaagctctgactggtgagtgacaatggtaggtaaaactggtctcagagtttgtttcagtagcagcaggttgtttcagtcgctgttagataaaactggttttcaattacactaggcagttccagaaaccaggctagcagagaattatatttctgaagcaatgttatgtgtcctgagtgctttttcccttggcctcttgattctgttttggttgagtatgacaggaatgacccaatttgtataatcaacattcacaccttctctgcttcagaactgagctgggactgccctccctccttcgttctcatcaagccagctaaagtcgagtgccccagcatggctcccaaaacagacaggcccagaaagccagtgtggctctttgcctcagggaggggtgctgcagggtaagcagcttgcaaagagggggttcagctcagctctaagagaaatgggactgagaagggaaaggggagcccgaaaggaaaccttgatatcatgaataatgttaatttggagccaaagaacctccttgccgatagagaaaatcctgtctactcgtaagggcttgtgcatgcctacattttgagttggggctagagttgatgacactagcatgttcctttgaggtttacaattctattttttctcttatatggacggatctctgcttcagctaaattggattatttgctggacctaagcttcctgtgctttcctatctctatgattttcatgcttttctgactcttgaaatgtctcctcagttcacgcaacaccatgtgtgaggtcctatgctggatgacggaggtccagcatcatataagatgcttcagtgtgctcaaggggtgcaatgtttatttcagggaaatggacttgtaacatattacaaatcaataattcaatgaatatctatcaagcatactttctgtgccaggagctgtacttggtgctagggatatggtgttgaaccatgagagagttgctctcctccaggatccaagtgacaacagaaggcaaaactaactagcaaacatataacatgaagaaaaacaaagaagactaagtccaagagagtgtgtcctgtatctttagatagggtggatgggagtagcttctcagatgcagtgccatttaagcagagacatgaagtgagagcacacagatggccagaaaggaggccccctgcatgcagtagagaggtgagcacaagccgagaagccacaggaacccaaaagaggggtgggggaagggaggagagcagcaggtcagagagaggctggcagagagagactttggccagccacgaagaagcatttgtatcttcctctgaggaagatgggaagccactgggggttattccatttgccgaaaggaagatgattaagggaagaggaagtatgccagaaatgatactgcggcatggtaagtttacatacagtgcctgtgaggtagcaaaacggatacgttaagtaggtgtttgtgtgtgaaatccggagttcaggaagagatttggaccaaaaattttggaatcatatgtgcaatgcactaaatgtttttgtcctccccccccaaatttatgtgttaaaattttaactcataatttgatagtattacaaggtagtgtctgtgagcagtgattagtttatgaagatggagacctcatggatgggaccactgtctttataaaggtggcccccgagagctctctttttggccaatgagaaggcagtgatctgcaacccagaagagagccctcacagaagccagacatgctgacaccatcagctctgacttccagcctccagaactgtgagaaatgcatttctgttgttcataagccactcactccacagtattctgttatagaagcccaaatggactgagggtatgcaatgcatgcatttgagactggatcactaggggatgagtgtgagtagagagggaagaagtttgattactgagcctggagttactccaatactcagcagagaaggaagagcctggaggcaggaggatgaaaagaagagagtgggttcttggtttacaggtgccttatgcaggagagcaatcaacagtacaagtgctgctggcaggtggagtgagctgagaactaagaagagactgctgggtttggctatgccgagatcacctgtgacctgacaaaagccttcctgatgcagtgatggagacacacagatgtgcacatttggaggggaaagcccatagtcgaagcatttatagggcacagaggagagtggtcaagaacacctgcggagctccttccccagcctctgcctaccaaaatcccaccatcacaaaattcatctgttctcatttaccttccctcagcctctctccctacccaactggactgattttctttctccttctaacacccagcaggattttcatgacgtgtgttactgtctgtcacttaggataggggctctgggtgatgtgttactcacatttgtgtcttatctctagcacctagcacaaggccttcggcagaataaacactacagaaaacatttgctgaattaaattttgagagtagttaccaatctcaggccacccattcccagggctgtctaaactgggttgtcaaatgctggagcaatggtttgcaaacttagttcacatcaagtcacctggagggcttattcaaacagttttctgggttccactcaagagcttgtgtttccgtaggtttgtagtccaagcatttacatttctaacaaggtcctaattgatactgagacttctagttcaggagttgcacttggatacccactgccctagggcaaaaacatgatttcattcaatcatgtccattacttggcttccctggagaagctagctcttgtttctttgtacataaaggcatctggccagattgcacaggataatgtgaataccacctctccatgcagttaaaatgccttcatggatctgtgcataagcctcccacatgggggtgcagacatctacgccactctcagaaagtagatcagacagctgccattcaggacctactgcgtccaggggccacaggcctcttgctctcaccagcaaggtgctgaataaacaggtgcccattgtcctcacctgcttctctacagttgtatcacccaggttcagaaagggcttggtgtcttccaaaaatatttttaaactatcttatagatgtgttcattgcacatcactgaaagtctaaattctatgttcatctataggattgatgagaataagaagtaatacgataatacagtattatcagtatttattatgaatgttcagaatttcaacttacacattgccagcttttagaaagaaagactatagaaaaaaaagaattaataggatgattatgagtgcttagaaaggaaaaccgcattcactggaaacaagcattgattcactatgagtaagtcctattaacctaactcatttcctttttctacctagttacttgtgaagaaatttagtaaatttcatgttttaaatctaagcacggtcctgggtggtgggtgaatttgtacctagttgaatgacagtcctgatagtgttgagtagtgggtctgtgtcaacctggaggaaggccttagtcttcaactctgtcctgtttaacctatttatcagcataagatagagctactgaagacatgcagatcatactttcacctgattcaaggctggggtggattagttattagcatgacagaattggatttcaaaggatgttgacaagcttaggaagtgggccaggttttgtatttttttaaaaaaataaaacaattgtctcaaagcagtaaaagaaaataaggctccgtggcagaacttaaaaaaaatgcttaggaattttagttgccagaaagtatgatgtgtcgttagtgtgtgtaatttcccgaaaagttgagatatgggactgtattaacagaccaacagtgtccagaacaaactttatttccagcattataagcagtcagggattcatagacagcgtaatgccctgcatggcccagatgatgaatagactaggtcatgtcttctgatgaggaatagaaggaacagagggagcctagccttcagtctggagagaagaatgaagatttcaaatattttgaaatctctcacttggttctcatttattttgaatggccccaaaggccaaaagtaagatcaataaatgaagtaataggattacagattttggcttagtatacaagtaaaatttttagtattcggaattatctatagatgacataatgacaacaataatgatgatgatgaagaaagcaaaacctgtagcaactcatgcagtttcataaagcacttcttaatccaaatactatgctcgattcatcacaccaggagagtgctttctttcttttttcttttttttccttctgagatggagtctcgctctgtcgcccagactagagtgcagtggcgcgatctcagctcactgcaacctctgcctcccgggttcaagcgattctcctgcctcaacctcctgagtagctgggattacaggcacccaccaccacgcctggctaattctttgtatttttaatagagacggggtttcaccatgttggccaggctggtctcaaactcctgacctcaaatgatccgcccgcttgggcctcccaaagtgctggaattacaggcgtgaaccaccgcgccctgccaagagagtgcttttgatgtcactggggaaattcagcccttggctgagcaacagtgttgcagaggatattcaagtattgatagaaagttgaacaaggtgaccttatattatgaaaatactgtgattctgagctttcttaagcttgtgcacagtcagaacaatcagtacaaaatatttgtattcttcaaatagtttagatcatttcctctggatgttttcaagtataagggaaattgtgaagatgagggtatcggttgcaaaagctaccttgctctacatctgagagagggattgcctgtgaaccagaatctacgggtatgcctgtgggcaatcactgttactttatagccaatcttctgacaataagacttgggttggccagtgcattataatcccaactcccttattgttgcaaagtagaatgtctactactcagcagattgggtgccatagagatacagaaatctcagaaaagcatctcatgaattcttgtaacttccatgtctgtatagtgactgatacctaccgatatttaacaattttgagttggtgaaaagaaaattaaaagacagctaaagaaaagtatctgtggaaatgacattaagagatgggagagacctatgaacatgcagaagctaaagaagttgaactcagagaaaagagattagaagggtgcataccaggggtagcggggtggaggaaatggggagatgatgggcaaaggatacaaacttgtagctgtaagaggaataagttatgaagacaaatgcagagaacagtaactatggttaataataatgcattgtatatttgacatttttgaggagagcagatcttaagtatttttaccacaaaaaaagataactctgaggcaatgggtatattatctaccttgattatgataataatttcacaatgtgtatgcaaaccaaaatgtcacattgtacactttgaatatatataatttttctttgtcaattatacctcaataaagctgaaaaaagagagatgtgggagatacaaagcagggacattcaaattaaacatgcctttatctgaaatcccagcaagaccaagagaaacaaaaacataggtttatgcacacacaaaactgcatgcaaatttttgcaacagctttattcgtacttttcaaaaactggaaacaacccaaatgtctctcaactagtgagtgggtaaaaaaaaactgaagaacaccacacagcaaaatactactcagcaataaagaagaaagagttgctgatattgttacatgttttgtggctgagccttaaatgcagatccaagaggctgaatactgtattattccattcacagaacattctggaaaaggcaaaactattgtgacagaaaacagatcgggtctggggttgtgggatgaattgactataaatgggcacaagagaattttttggatgatggaaatgtcttatatcttgattatggaggtggctacataactatatgtttgttcaaacacataaaactatgcactcaaaatggtgacttttactggatgtcaatcatacatccgttttaaaaaacaaacagtgacccaacatttaaaaatacaaaaatgacaaaatcaagaggctagtgagggctggggtcagccttataagaaggaaggatgcaaatggcacgttgaagttagtgaattcggttcagcagagaagaaaggttgaagattgtcagctaaatgctgcttttctttgtcctgagttccctcttccttggttgagagtggccactgtttcagttgaggggatctgattctgtttcagtggtttcctttcatcctgcatggatcctggcaaactccaacatgtcctgccctcttcctagcattgtacagcaacttccaggaagggcctggcagcaaaactgccttctccctagagcgggcccacctagggtggtccaccaccttctccctagagcaggcccacctagggtggtccaccaccttctcactagagtaggcccacctagggtggtccaccatggcttgtgcctcccagctgaaaggtgacaaacaaaaggctaacctggaactaggaagggtcacttatctactcatgaaaaaaaaaaaaagaagatataggtaagaataggttatttggaagattcaaatacaacctctccacatcttctttgcatgcagtgcagcaattgccggccctttagagagctgccctctggcccaggtctgccctgaggtcagtgactttacctcttggaccttcagctttctcttctggaaaaagattataaaaaggttacaggagcaacattccatcctattgccctcctgtcccatggtggaaagcagccggagattgtaggatctgagcacaagccttgctctccatccacagctcctggtgctgccttaaacgacaacagcaggtgcacatggcaggatcctggaagcaggggcacgtgcatcaccaggaggtcctagaccacagcagagaggcatgggtgagggtagcacccagctctgccccccagtgcgtgacctgggcacagctgagccaaacgcttgactgccattttcacagctgagaggtgcagcttgtcatctgtaccttgctgtgtggccgctggggccccaggcttggggattagcatatcagccaggcacatggtgaatatttagtcaatgacagctgctagtattattatttaatgtatttgtattaaatatcctattacatacttattaatacatttatcaaaaataaatctattgaatttattatgcattattattactgttatcgtgaactagctttacattgtcctacctttataaacctggcccctgcaaatactctgcttcctgacgcttcttcattgctgaaatagtccatgtggaatccatgctggggcatcggcgcctctcagactcagcccgaagccgcagtgccaggctgcatgctaatcaggcggtggctccaggagaacgggcccaggaaggagagaggatggggcctggaggcggcagcctgccctggcagcttctggctcccagagattggtttatcaccaggtttctgatgaatgtgtgagaaacgggactggcgataaagcagcacgagccataattaaagtaacagctcttgtttcttaaaccctgtttatgtggtgcttggctttctaggcagtttccccgtctcccacttgaggaccgcgagtttcctctctctggagattgtggatgaggggctgctgagggaggagggtgcagaggggccagcaggaagagcggtggacgtggctgcaggaagctggccccttggttcttcatgaaagtgtcaggcaaagcaagtccctggagaccaagcaccatatggaaactttctgggaatgcggcagggagttgcaaacacaccatggagccctggaactttagaagaccggagaatgatctgtcaggacacctggccccaccctcactacacccgcagcaacgcagggaaagctggggggggggcagcaacaagggaaagggggccccgtcatacattcatgactgaaccgctctctggcagccgtctctaacctgggtggtacattcacaggttataaattaacggaggctcctcaacagatttgcctccctaacaggattcccaccctctctgtttccttctctcttcctggctccctcctcttccttttcactctccttttccttactgccccctccccaactcccaatttggcaaatattctacatactcaggcagtctgacacctcgaacaagctcacaaatcagagatgtcttccgccccagtcctgggaaccagcagtgccccgaggggccaggacgcccttctgccggctgagaaccacattctgtggaattctggctgatttccatctgtcagtgtccaagcgggtctgcgagggatctaggagagccacaagcaatgcttagaaagttggtcggatcctccaggtacttttcctaaaatccccaaacctctgaatgtgccggtctgggttgatagctctgctggacaagaccccctgttttcattttgactccatgtttctagaactgtgatttaggagtggaggccattaaagcctttggaaaaatcacacatgtaaacacacacgttttacacgtatacacatgtatactgcactgagtttagctgtttcccaattctccccaatggtggataaattccaagaatggatgaccccagaatgatttatatttggctttgctgtatgttaggcaattaatgcacagtggcatgaccctcccatttgggctttgctggtgacaaatgagtttgcatttcttgaatactaaccagctgggtggcgaggtggagctgcttagggataagctttgcacagatgagccgccccatgggtgacctgcgggtgcctccgtcctctaggatggttggccccacacacgtaccatagcccattgcttctctgcagcccagactggaaaagggagctgtaaactctgaatcacactacaatctgagaaaaatccaggtttctttttttttaaactagaagtactagactggtgaaggcaggaggctccatggcccactgggagaaggtcattcctatgactgcccaggttgccagcttactatgtcttctcttccaaccattaaagttcttgtcatacctggggtctttcaccccaggccctgaggcctaagcccctgggatctgtgtactcctctgaggtatcctgcgacctgtgattttacagagcagagcacaaacttggattgaaagtcaataaagtattgaattccacagcgaacagtcttttcttttgtcagaattccaaattgggccattgttagcacagacagacaggactagatactcccctgaatgcaccagagccattcccaaagctcggttctgcagggccatgtggcaggaattatacctagcttcatagaaaaggtctgtggttgtcccttggctgtgccctggagccgtgagacccctctctgtcctccaaagccacagcagggtaacctgatacttgctaatgaccaccagatggctgatgaccacaagggggcatggccctttgagcgccccttcagggtagaagctatcactctgcaggagtgtcaggcaaagcaggatgtgtgtctatgaggaacctacaagcttttgcccaaagccatcagccttcagcagggagaagagcagcatgtgagcaggtgcgtgatctattctggatcctctcagagcctgcccgaccctgacagccaaggattgtgcccgtcgaaggagcccacaagataaatcaaggggcagagagaagaaaacagcaaagaggagtgggaagacggagaaggagatgttaaccgagagatgagcggaggaattcaagctacaaatgcagcccagatttattgacttcttcttaagggtcaggcctcgtgcaaagtgcattttatttaatccttaccacaatcttattacaacaggtgctattattatctccatcttagagctaaggaaacttggactgtaagcatttaagtaacctgatctaagatgcacaaacttgcataaggcttaagcagttgtggaggtttgggaaaagtgacaactaaggtcagctcttggaactaacccctccctggggttgtgcaggctgtgtgctagcccttcctcagtttctctttgaaatgagaatcattctgctaatctctctccctagcatgttatgccgcacaagttatatgtattaatttgcggcatcactagcctctcagtaattatctccatgaattccctcctttccattgaaattaggtagctgggtatatcatggttccaaatcactacagttgttgatagagcaaatagaatcaagtatataactactatacttggaaaggagacagcttttttgaaatcaaaatcacaatttttttctcttcttttaatttatttttattgtgttggaaatttgcagacttattcctcactcggtcacactttcacaactgcaaggacaaggggaatgaaattactggcctgctttccagctcactgcacactcactgacacacacgtgtgcacacatgtgcatacacgtacacacacgcacatgcaaacacaccatacaggctcccaatccaatccttagttttctggcgtacagggactctgaagaattgcttcagtagtttgagaatgatgaatgacaatgtttttaaaatatatatttactgttggtaaaggaaagctaaggaagggagagagtagacgagaaaagaagagaatgtaagaggaactaaagacaaaaaggtggggacagatgggccaagaggggtaagaaggagagggatcccaggaggaaatgaattgtaactcagagaagcccttgctcctgacaatcatgcccttgcctgtctgcatttccacgggagatgagtaaatttctctcattcccataactcatcagtagtggtcaggagggagcccacctcccaccaggagggctctggacttcatcagcccagttaccctgcctccagacattggttttacacaaactaaaaaattcaactgcacttcagaactctattatctggccaagtggagagctggccatgatgaaagctaccccagacattctggtagtgattcttcaaggtagaaacctgctctggctatgtatctgcttatgttcacagccctgagatacctgagtgttggactaaaccagtgttactcaaactgcaggctgcaatccatgagaggttattaaataatttagtggcctccacttatgatttttaaaaaaataaaatagaattactgaaatgctcaacatatagaaaggatattttatgaacagtttattttggtggagtgtgtgctgtgtgggtcacagtctagacaggctaaaagccacaggattgaatgacctgggaagtttccagagagtctgtgacctctgagtgagctgttcccccagccacttaaatcttgaaaatatgggccaggatgtcttctgataacaagctccctcatgtttcctctgtctatgggattctgtatttaagaagattctaacacatcgtgggcatccgaaacgttccaaaacttcttgagtcacctctttggacagctcccgaagagtgcagtgggggaaagggatgacgtagggtcagtgtgaactgatctcacaggaagggcatttagtacggtggcttccacactgcagagcccccttggctggcaggtgcacagcctgcccactcgcactttgcctgccccccttcctgtctgtctgctccagcccatctgattgactggctggctcaggccacctaatgagaggcaacaccccatatgacaaagcccatgctgtgtaatgggttgattgacatcctcaggacgtgattccgcatgcagcctcacttgcagataatgtgaatggttgaggaattaaaatgttgctcggtgcttaatgaatgcagcatgagcctcatgttagcacatgccagctgcatctctgagaaccaggaagcagcaacaatttctaaattatttatcaattcccttacctccaccccaaaagaaagtcagcttatgcatttatttatttcatgggccgatatgcagagtaattgctttggtttttttgtgagttttttttctatagattttatttttctgatgctacagtgaaaaaagagagaaaatatcatgtcaatgtcatttgaatcataatagctacaaattcactctcctgaataaatagagaagcttatttatcaaacacagacaagatgtctgtcgagttgttaacagaggaagagagatttgagtgggcaggagcaattgcaaaagtttgcatatcttcaaaactccctagggaggtgcaagcagctttttccccagctaggaactttctgttttgacagctgattggccagcaaaattggctgttccaccttcacagggtgaaaaggggcaggtggtttgggcatcctagctgagcctggacctggcaggtacgagagtgcttgtccccatgcagattcttgtccatttaaggcagaacaattggatgaaataccaaggcaataagcagatggaaagcgttggttgttcttacccatggcctgtggctctagcttttttattctgctttattttttcatcttatcctggcagagctggctgctgctctctgttgcaaatccaagctccgtttcatcctttccctgggtttccccacccacaaccagcgcctctgcatctcccctccccacccactgccactgtgaggccacctctgctaacgtgtgtgggctctgtgaatgcttctgtaagaagcagcacaatgtaactacaatggctactatctttggagtagggcatcttctaagggttttacatatattatctcacttaattctcaggatacatatattatctcattttattcttatatcttcctcagctatgaggaagataaactgtttttatgacacttgggtataaatgagaaaaccacattccaggaaggctgatgacttgcccaaggtcattcccaggatttgagctcaaagtcttgtccactacattatactgccatcacagatagacagataactgactgcagatcaggagacctggaggccatccctgacagctgagttgccttgggcgctgcctatacctctctgggagtcagttgctaggcagctgataggctcagtgtcataatgatagggtgggtttaggacaagattgcctggggctaaacccatgtactaccactgagctatcttgggtaggttacttgagcttagttttctcatctataaagtagaaaaatgatcatagtacctccctcactggaatgattttgatgattaaataagttcctacatgtagaataatgagagccaagcttggagcatcgtaagcagtccatgttcattatcactatatagattttgtctgtgtgtccatctttatagcatgaggggattcaatgcaatgatattctaaagtctaatttggtttggaaatcctatgaatctggtctgcatttacatttccttagagctctgtagctctttatggtattattccaatgagaacaaaattagaggtgaaagctggagtgactgagccatggaatagcttgcacctgtgtgtctcatctacatggacactgcccgtcctcttctgtgactcatttcatatgatagtatgaccctcacgttatctgccatgggcaggacatggttactttctctgttttaaagacctgttctgctattagcccggggttagaaagttagtgggaaagtaggactctaatccatatgtaccgcttccaagagagttctcagttgtctgaaaggcaaagggatttgagccttctgagttcaactcccagcaaggaggtgccctagaaaagaagcttttgtctaactgtattagccatttttcactccaaaataaaagactgggcaaagcattctggctgtatttcaccagctcatttttctctaaacaccaacatttaccagctttcctttttctgatgagagagtaattaatcttgtctcctctagaccctcacactggcacacgttgctactgtcttgaaggcagatggttctctgggagaggaaagtgagatagtccagagcagcaggaaggcttgaaagttcaaatcctggccaatggggaccagcacaagttgccccaaaggctccccgagttacttcgaggctctcctctgggagccagctttgcacctggacatgctctcttggctcacaggcacatgagcaggtcagaccgtgaaagcagccctggtcttcatttgcatgcagtgggactatcaaaggtcctgaggggaagggagaggtgagagactcctgaacttaaaagggaaagcagccagcttctgggagcttttgtcaagccagaggcagagaagtgatgcctatgaacacttgcatttccacgctccaagcctttattatctagaccatgtaatccatttctgagctacactgtgctcgccgagtagaaatttcatctttctcaggagatcataagctcaaacttgacaggaaaccttcctgccatacatttttacagcctctgcagcctaacatcaagctgggaacatattagatgctcagtgaattcctgaacaatcaaatgcgattgaccaaactgaagctcacagacatgttattcatacatgagtattgtcagctcttactaactcagactggggagggcagcctcaacccagataactccacaagaatgtctaatccccaagataattctatctgtgatttctctaaacacaatgcacagttctgtttacctatttgccttcccaaggaagttttccttggttaatccaatcgctcattcaaccagtttttacggagtgctctctgtcaggcactgtcctaggagattcaagggtgatgaaggcagccctcatctctgcccacttgggatctatcacgtatggggaaaagacagataggacaccatcatcacatgagttattttgttgtaatagttacatgtgctactgagggatggtgagtgttttaagagtgtgtaacggaaagcccacttagagctgcctgagaggcagggtggccgtgagggaattagtcttatatttatattaaaacttagggaatgagtgtgagaattccaggggcattggaggttgaggtaacaaggttaagatgagttctcatttctgattatgagaatatctgcacagaagcatgccggtaaattcactctgtccaaaaggcaaatgcttactccagggtctccagcatagcctgccttgttcatgaatgagagggtggaagagctgctcctggaggttctgtctggggactggggttgtagggatttactccgatcaccagctgcttgtctttccaccctgagtgttctgtggagtcagtctggaaatgagctcttcttgccaatgactcaaagtaggaaaaataaaaatttgcttatgggagagattccagtgggagcatggatatgctatctggtgcataatggctgtgaattccaaccagcctcctgaaaccaagacgtttcaattaacaggaggcacttcaaacctgaacatctctctttcctggctttccagtcagaatgctgttgtataaataacaataagctggccccctcagaggctgtaattgagtctcttctttctgctggcatcagcgggattcccttgagtgatttactgtgtggctatttaattgggtgacacatgaggaagtcagccctgctttgtttaattacactgggtatcccccctgcatggtgtcagcccccactctctggaagggctctccggtaccactcttgcccaggaaatgattgcaaaggtgtttgggaagaccagggacagagagaaatggctagatgtttgaaaaaggaagggaatgtggatagaaaagaagactgatcccatgaacagaatagttacctggtttacagatttaacttgttctgaacctaaataacattgagtgtctgtgtgagtatgtgtgtgaatgtgtgtgtgtgagtgtgtatgtgtgttggatgtggctgttaaaggaggggaaagagcgttagaaagtgcacataatcacaaaatacaagttagcaaatgttaggtgccttaagaaagacacagttatttttccaaacaatttcagcactactttcttcctgggtaaaggcaatgaggagaagggggtaagtgtaaaaaagctgatgggtgtttgacaatgaataaatgtaattttataccttataatagccctctgaggtagtatttagcatacccacttgatagataaagaaactgaggctgaaagacacagctagtaagaggtagacattcaatccagcctcatgcctgtctgactccgaagcccacattacttccactaccccccagagattgagtcatcccttgatctttcttcaagctgcttgtataccacattgactaattactccgtgaaatattaattgattttccacggtgtacatagaataggttttggtctcgtaagaatatgaggatcaataataatactaataacaatgaaaataatagccaatatttccagggtggttactattttctaggctttgttcagaatattttataaatattgactcatttaataagatacttgcacttagataactggacttcaaacacatcccaccaggcccttgaacagtgagcctctcacccctcattatttggggcttggtagcaggcaggagcagagaggaggctgtaatccactatggagcccaaggcaggcaggggtaccttgggctgtggcatggcagctccatgtccaaacacaaatctcccatgctttgacaactgctccaagagggtttcctaagggagtccatgagcagaatgtatggatcctgatggggagggagagcctgtgaatcaataggtgaaggcgtattcatcagacacaaactcatgcatttttttaagctcattcataggggctcaattttcctctgctcctggcaataccacacgtaaagatagcttttctcctctcagcaaagaggcagggataagcaggctttcaataatattagaagaactagagagtggacattacttagaatttcctagctgcaaggtttttgagaagcttggaagcataactgagctaggagagggaaaatggaagccaatgaggcgtggccatcccaggtataacagctccatggtggagagggaggggctcactctctctcctgttccctctgtttatttcaaacagaaccactctcccagccaaatcacatggacagctccagccttccttctctcagaggatgaggtagccctctccctgctaagagctgattctgccccatctattccttccatctctggcgtcttcaatctctccttccttttgactaccttttcttgatctacttttctttttcaaactattgagttttcccttaaaattaagaataaaaataaaccctgaacatgtcttcttctgacaatggtcttatctttctccttccattctcatccaactttctttaaaaagtagttcacacccccactgtcttcacctcattctctcattttcactcctcagtcaactgcaatctggcccctagtcttactttttcattgaaattactcttattcaagtcagaaataatgacctcctgtccagcaaaaactacaaaacgctttcagcatgctctgatctttctctgaacatatccacatctctcacctttgtaacagttgacacagttaacccacctcctccatctggaaactcttcttcctcagctcctgtggcccattcccctttcccagttttcctcttacagggttggtttctttgggctctaactgtagctcacctcttgctctacatcttctccttggcaatttcatttacactcatgtcttaaagtctcatttacatactagtaattccccaatcttgatctccagtccatgagttccacccctacatgcccacctgtctgccaaacagagtcacctggatggttcccaggtaccatatgcctcaggctctttatatccagcatctcattcatcatctatagctcctgctctgctttcttctgaattctctttcttgatttgtagcatctccatctgctcagctgcctagccaggaacctggacttttcaacattcatctcttcccgtgctccattctccagtcttgaaatttttatttcaaatataggcccatcttatcattcctgatatcactctcttagttatagggtatcattatatccttcttggactatcgcaatagcccctattctccttacgccacccaaacctatcctccatactgctcccaaagcaatgtttccaaaatgtggagcgggccatattagtacccatatttgaccagacaaagtccaagctgctttatgtcacaacgaaaggcttaatatatgtgatgctgggctttctctctagcctcattgcctgcccttgctctttaaggaataacaatgtcatgccacttgtaattaccccaaacaatcaaggccaaatgttttctagctgtctgctcagagtgttccttctgcctgaaacatctctcttcctctttcctccaccatctcattgactacatcatctctgtagtctgttctcccagttggctgggcccggttggttatagatatgaggaagtaacttttgcaaaccaagcccaaccttttaagcagacagagtagatatctgcccacatggtttgaatggtggggcttgaggaagctgataactaattatcttttattatttaaaattatttcattatagggttattcctctgattttctttgcatttttgttcttggagaggtttctatatatttttctgagaagagtttaatcccctaaacctttgtgagctcccacacatgagaagggggccatgacaggtacagagggtgtacctgtccctctcggcaaaatgggacatgaaataaaaaattgccctgaggaggaggaggaggaggattgaaatgcagggagctgataaactgctacatatcacagtcaacatcacacatcttgcttgggtaaatcatgtgggatgatctagtaagttaggattcaagttaatatttagatcacttaaaatgaggaaatataaatatttttcctgaataatgtagaattatcacccacgaagccctacattcattttcttaaaggaaaaaactgccaaagatagattgtttgtttaatgggattttatgagatgagccaaagtataactgggctttagaaatgaaagacaaagataatgaactcaataccttacaggtcatgggagacacagtgaggaaaaaatgatgttactgtgaaaagattgggaagagaaaaaaagaggcaggaagataaagacacattcaaaatatgtattgaccacctattatgcagacactgagatatgggcataatccttgccttgggtatttacctggaacttggcaggtactcaggataaatatttgtggaaggaaggaaggagtgaaggaaggaaaaaaggaagaaaggaaggaggcagggagggaagaaatgaggaaaggagggaggaaagcctgtgtattcttcttagtctgtgcaaggtgggtgaagttaactaaatctatacttactctttagcttttcacccattttatgttcttgcctagggtatgttcttctagaaaattcataatccattctccactaaggttagggagcactcttccatgctatctacagactacatatcaactcaccgtgttaaatgtgatgagttatttaatagacaagtgagtggcagggttggggtctaaaaccaggtagcagcaggaccccagctaatcatgtacctgggccctgtggccatgcttaggattggagaaggtctccctgctcgtctagactgctagctaggccagccatctgttacttgtctggaagggggaagagaggtggcatggtgctcagggctgtggcagatccagtcttggtttcctaatcagtctattatttacaggctccaaagtaatgggaggaggggcaggcttataacctgtgatgagaggggtttatgtgtgttctgggccagttttgtaagacagctgcccctataaaggatttatcaagacaataaaagaaaaaggagagagcctaaagacactctagtgaaaatagcctttttatggtatgagagtttaagagggaacactttgaaaagaagccacacttcccctgcccaccccacccaccccttctcctactcagcccacataggcggaaaagctctctaatctttatctcaggggctaaatactataagcatttaaagtttatttttgtcttatgatgacgtccagccttcaccaccataccccggataagttttcctttaattaggaatgtctttcctctttgggctattcttgtggatgaaagtgaggaacttagggggcacttgctatgcataccccgcaccccgtgttttaacagagtgataatagattcagctcgataggcatgtcttaggcctcagtgatggtttgacccagactctgggagggtagcacagcttggaggagaaagggtaatgcttggaggagaaaggcgaatgcagaaccccagatgatccaagatgatccatgtaagaatcacatctatttgtatcagtgtgatcacaagcagcaattataagaatcctagtcataacaaatctccatctcagagatgaaaaaaaacagatttatgaagtcagaatacagcggaagcagtgaagaaacccatccagattccacagctatcaaggaacagtgcagggaccctaactcacgtctcccaactccaagtcttgtccattctcttctaccccacttctgcatttgggttgatgttgccattctcggtggccagagcatctaatatgaaccaggtcctcttctagtgaatgtggctgaccactgagtgggagggagaggaggagagagtacagaggagagggttcattgtgattccaggacacagaggatgcgccctctgcttcctatatcagcttgaatgttggtgtccagtaaatcatatccaccctgttctccttactctcttctacctccctgaataatctcttacaacctctttgacttcataaaaccatttactgatgagtctcaaaatactatttcccagagagatatattttctagatatctattcccagatgtatcaaaactccctaaaatgcatgtgataaaactgcatgtatcagtctactccctgctctccatcctgttccttgtccatcagaagtccaactttatagcctgtgggtcatactagatttcttccctatccttacctacaacgtttagcaggccaccaggttctgacaattgctgttccttaggacagtggaacctgctctctaccttccttccattcccttgggttacacacagtgactttctggcccacgctgcactagagacccaaagctgacctttctgcttccacttatttcttctctcactgctttcataataattcttcttaaagaaacaaattcaatcagatcactcccctttgtaaaataatctttcagggcaagtattttgacttttcatggcccggtcagtatctgccattcacatttcatttcttgtggcacctaacttttcagccttacagtttccttcatggaaacttcctttatcttgtttttgaactcaaaattttgcatatcgtgctttcactgccttgattaatttgcctttctctttgttacgtggctacttcaaatttgggaattaccccctacagggcacacatcaggaattaactcttctagagagcatttatggacaccttgcctaagaggtaggtagcataccagggtaccatgcgcatatttctgtcatagtggttattacattgtagtgtaattctacattcagccagctttatctgcctcatccacataactaggagactcttgttttctacatcttgtatgtctagtatctagagaaatgcctgagggtaggagtgtttagcaacaccattgctaaatgaatgaaggcaagcttcatatggactagtagcctctgtggttatccaagcacattcataatcagagactctgaccacggtggttataattgttaaaagtgatgttcccattgaatttcttcaccacacagctctataggaagagactcaaaactctgatgttcctacccagaaatggttacatttcgaagatgtctagttttatccaatgaagttgttttaaaattgaaactaggcatctcagctctgtgaaagcagcaaagtgcttcttcgcatagcccagcacctacatttcaatccagtctggttctttacttggtcctgccctatgcctgtgttgggtgttgggaataaaatgtgggttccacgcagctccaggacttgaggagcttggtgaacactcactcgcccagggcagcactgattcctagtgccccgcacgccaccttgcaaagccaggggcttaataaagccttgtttatgagcattctggccatgatgactcaattatccaattattcataattcacttaaataaccactaaacttgttttgagtacctgctatatgccttttgtatagagataaattagagacattctctctgcccttgtgaagcattttagggcttggagacagagaaaaatgtacaacaggcaattataatacaatggaaaatgtgctaatagaagtctccatacagggcaggttttccagactgaaggaagagagaagaatattccagacagacagaaccacatgtataaaatttgagaagggtgggagagagcatgagaggttcgaagaactgttagagagcagctgggattcatcacaacatgagagcagatgggttatttggggagcccggaagaaggaatggtgagaaaggagattgcagaggcaaactaagggtcgcctaaggtggaaggaagagaaaaaggaggctgcagccagactaaaatttggaactcctcaccttgggccctagagagcaccatatggctctggaacagccagaaaagtgggctctgcaattttccaggaaaagaatggttctggaaatctgtggaccaaatagagaactgttgaattaatgtaagaaagggacgatgaggaaatgatctggggctgtggcagcagggatggagggaagggagtgattctaaggtcattgggaggtaaaggtgcaggtgatatgcaattgtgtgtgagaacgtcagcacagaaagcaagtcaggcactcagctgcatgctgaattaaagcaggtgtgaaagcttgagaagaaatattaacattttgataaatttttttttaaaaaaatcaaaatcaatgttaaaaaagtattaacaaaatatcaaaatttcaaatagaggcaggatcagtattactgatttttcctttggcctgtggctctgctatggcttgacctggtactctactgatcctagctttatttaaacttttgatctgtcattcatcataggttttttgcattgatttcattttgaaaaaaatactgcattcaattattgtttatcttgattactttttttttttttttttgcactttcttaaatttcgtactgagtcaagtgcttcaacctactcctggccttggaacagagtagtagcaagagagagggtgatttatcaggaatgattgcaagggtaatgtcaagcaggatgcattgatgtaccagcacaatgccttatgccactgaaggacaactctgtctgttccttaaagtgacttttcttggatagcaggatactacctttcctctacccaccaaaagctgtcgcttgatactaggcattttcaccaaatgaagacatcatacagaccccccacctccaccttgacttcctccctctgagcaaactgagtttgggtctcccatgacgaaactcacgtgcagcttgtgtacaacttccctaaatgccacaaatgcttcagaacaagtgtggaaattggtttctaagctccagcagtttctaaaataggggtggtttaaaataaagcagtatgataaaagggattcctatagagcagattgtgggaaatagcagtgagcctccaaaacagaaaacctggggaaaaagtcagaaagggcatctagccattcctgagtaagggggcgtgggaggtaaccgtggtcttccaggaagagtggccagctctgtctccattaacttcagtctgggtggtgggggtgggggaaactcatttctttccatcccctgaagcttcttttcactttatatcctggcttgatgcagatgtaatatattctgtcggtgaaaaatttgggctgaaaaatattgtggcctttgaaaattgaggagggaattgggtgggggttttccaaattaatggcaatgtgcagatgaatccactgggcacagtggggtagaagtagggagggtggtagaagtgtatttctagaccgatgactgcatataaagcaatgcttgagtgaagaaaacagtagagtaggtagaaatggacatcgatatagagaatttgatactgatggattgtgaatggaaatttgagcttcaatttccttagatgagtgggagagaaggttgtcttgtaagaatatgggcttgaggtgaatatttagcagaatattgaaggtcaagagaagtagagattgaattagccaaagatatcgaacgcacttggaaaagtcctagaagatcccctgaacgtggagacggtgaaagtgtgtggctcccatctccacaattacatgatttgtgtctctggctgtgctcagctttctgggcaaaggcttggagaaggtgagtcataggactgaccccagtttgggaagacgcaaggcctgtgaagtgtggagggtactggatggtggagaagaagggggagaacttcagatgtggttaatgtcagggcagtgtctgatgtggccagcaatggcaaacatgagccgtgctgctaagcctcaagcttccaagtattatgcaaccttttcataacactagaaagagctgagggagctgtgtggttgcagggccctgttgcagggaagcaccctaggtcagcataggcagccacacagccagtgctttctagcaactagggcctctttggtcctcttggcctccccttaccatcactatgagctctgcattgttaacagtacaatctctgcttttgaaatgtagccacacagccccaccttaggttaaaaaaaattaaaaaataaaaaatccttatttacttctctgggacacatttaggaacaggcctgttatagaagacattgcctttgtagcatgttaagttcccactagtcctcctactcataatgaaaatgctcatatatgggaaccaatgatgagggcataatcctcaggttgataattaagatagatgccgctaacatttcttaaaccatgctgcatacagctgtcagggcaggagggaatttgagaaggcggtatataattaacctagttggaattgggccaagggacccaaggttaatggccctgggaatgggagcattaatgaccattaatggtcaagccctttttcatgtcgtactcattagagctaccttttatattctgtaagatcatggcctttggcctcaggaccaagggtaatggagagttgccactcccccagacaatgtgttctgcattctgacagcttctgtccagctcttgattccccccacccatcacaatcttcaggtgtagtgtatagcagatctcaacacactccagccatctgctgagccctgctgatgagagctgagacatatacatcatgcatattcatgggcaaaaattgtttcaggtttttattcaacagatcgacaaaagcgtgacatcctcttgcttttacctgtttggctctggtgttcctttctctatacagtccctgggtgagctggaatagaatctttaaccactctgggatgtgtcctccctccatcatatttgatggccacaggaatcattaacgtgaatcttcacaggcttgcacgctgccttgattgacaaagaaactgctatttttgtccactctgtttatcctttccctatacctccaaaagagatttaacctccaaaagagatttctacctcataagctaatcttctgtgataagcttttatgatgcaaatttgggagagtggatagacagagacagaactagagtaaaggagatgagggtacagatgcatgggagagaagaaaaggcagaaacagagcaaaagagaatgagaaagtaaaattcactatgggtgtgatttgtgtgggggagtcgagcatgggtcctgggaaaaaggaagcttcaggcagctgtgttgtatgtgagagaagaagcacacgcagaggaaagttaattttaagaagtctagctgatggttatcaagcagatctcttttaatcttcttagagggctacaggtaaacactggtattagttttaattgcatcaggttgttgaagcattttcctttgcatggaaaccctcaacactgggtcatatggggttctgggatgacatgagtttccacatttaactggaaggctgaagtcaaagcttcgagagaagctcaaacagggagagtggctttgcctcctccttcaccttagtattggaaatacattctgtggttccaactttcctaatgagttttaaaaactggagtgtgttgaatattgccaaagaccaagaagtcccctactctctgtggtgagaagactgtcagggttacacattcgtttcaatcctcacatcaagtctcaagagtgggcattacaaacccatttgtaaacgtgcaaactgaggcctagtgccatagagcgacttactcctttgtggtcatgaagttaataagaagcagctccactcggagtaggagtctgaatttttataataaaaggaatggtgaagaaaggagagacactgaaagtggaaattaagttcttaaggagaggcgggaattcaatgaaagctacagggctcttctccagctccccttgccaggctcatctggaggattctctaacactcagtgactttgagtctttgttgggggagtgagaaaaccagcagcagcgaagaagagccgctgtccctccgctgcgtttcaccctgcgtgaaagcctcagctggctgctggcctctgcccctgcctaggctctttctttggacccaacaaaagggcagtgggggaagcagagcctgtcttctgcccttggcaattaaggtccaggtagaggcaggacaaggaagacttctgcctggcgctgccggccttggcatttcctccacgaacctgcaagagaattcatgccattgaatcacccataatcagatgcagtgactatcatttttttgtgtgtgaacatctcactggctgaacacaaacatctcaatagccatggcgccctaattttctttgtcggagacaacaaaaccaaaggtaatgagcaggaggagggactgagtcccagggggcacattgtctggaggagtctcctgggcttaaatacatctaaagtagatccaaaagaaagcagtgattacaggctaattttctgcctgcattatgttaagtgtcctgtctctacacaaatggcaattgctttatgccagaaatcttttactgaattcctcttattggtaaattttgtattaaaaaaagagagagagacagactaaagaaaggtttttttcaatttaaaggtgagactatgaggatgccagtaaaagatacaagactggcacatccccaagagttgattttccttttcaaatgcaagtattggagaaggcaaaatggtccttcctttgaatttgccagttaaagggtggaggctcccaacttgagctggaggaggacacagcgctgcttcgggcagcacacagggttctttgctgagacagctgagggggctgaggcaaggggcagaggtgaagagaggctgatgcatttggcccttccttagtcatcagatggccatccacaggagagtgagacggacacctgagaccctcttcctcctgcgtagacactgcccctttcccaggagcaatgagagtcagcccagccatgtcactgactgcctcttcctcttccagtctgggtctgaagtcctaaagacatttttttgcatgctcttccttcattcactcctcattcgtgctgtgaatacctcctaagcatcttctatgttgcagacagtgggccacaccctgagaattcaaaatataattataagaaggaagtggaaattatgatagtcaaacagaaatggaacataagcattgaaatcagagagatctgaatggaaaattccaccaaacccctccttgccttgaataaataccaagattttatacttgaaaaatggagtgggaggaggggactgctgactcctgcctcagagagttgtggaaaggattaaataatatctttaaagcaattagcatagagtctgtagtattcaatgcccaataaccacttgttgtttctgcccttatttgaaattctcagttggtaccagagccttcccctatcccagagatgcatctgactcacaaccaccagggcatcaggccctccaggccaagaggcacgtaccttccctaagtaaaatgcaaacctatggtcctcttgacaggaggctgggaggaaggatgaaggatgaaggctgtgacatggccacctggtggggcaggggaaatttgggatcagttccaagtgaaggcaatggagatgcgagagaggcccttctgtgccagctaccacagcaggcattttgtatagattattttgcaggtgtgtgtgaggggtgggactccccatccaatctaatctcaacaactccaggtgaatgttcgaggtgaggtcaaaagacaaatacaaaagtgcaatgtcccagagcccctgaaaaagctaagccttggtctttggccaccaaggcatgtctatttctgaggatgtgtggcaggaccattcattccaaaaagaaatgaagatttatgttacatctgagaataagtagtaaattagcaataagtcaacttttcatccaatatcccctgcagacagggtattgataccaggaaggatcagattattctccaaccatcccgaatgggaaactgggacttaatttatgcttgtctgtatgtgccacatgccagtgctgaaatgggtattgtgattttcttgactggttacctccagtgttgaatgcagcctcaaggacatgactgtgaggaagagaaggaggatattggtcttcatttctcgagatcctaggcagggaatgcagtccacacttcacctatgatgagctatgtgaccttgggcaaattatttctttgagcatgctatagcctctataaaatggggattgtgacatctgacagagttgtcgtgaggttcaatttagataacacaatttaaataccaagcagaggaaccgccatttactggacactcagttgatattagttctctgacacagaatacagaatgaaggacacttggcaagggtttagtgtttgatgatgatgataatgataatagcagcattactgtgggtgttcagaaaagaagacaaacacgggactctattgcctccagaacttggcagggagttgagtgctagaagtggaaatgggggtggttgtagctttgctgattcatgctaccagaaaggcactgaagtcccagttccaggcagcagagtcatctacggcatgcaggacaccacgttgtacaagaatgtaggttcattgtgctgcttggtcactcagctcaatcttctccatctcaggttacccagggccaactttcaattcatctcctttcccagcagtgaggatgctcttcaatggggatgtctctcagctccctgacctacagccacctagcatcacctcttatgaaccctttggagcctggcagaaattgattcccagattgagtttttctggtcaggaataagcagggatgtgaaataactgaactccatacaattccgccttttggatccactggactttggagcaagtttcctaagacactggattatctcatggtcaaggtgaacatctcccatcaccctggcagcctgtcaccttcttcctttccttcttttcctttctaaccacattcttctccagcttctctttctcctttatctgctcatttctctctcatttagtcttgctcaaaattgctctcaaagattctttttcctgccatccctcttaggaagcagacgaatagcgggatgccagccctggatggaccataaataatgcataatgcccagaaagagccagagtggccctctgattacaaagagaatatcttttgataacacattatcctatttactctttgtaatgccaccagttcttcattcagtagcaccacgcacccacttgctcaccaatttgaaaccccagcaaaaaaaacagtgttcctgctgctgtctgatcctggctccaccaccaggagggcctgtcagacatcctcttctgatgcctatgctgccatccctgggcccctggaagcctgccagaaaggtggtcagtctcttctccattcaaagcatatgtttatcttaaactcttgttatagcctcgtgttttgattcttgctgaactctggagaatataaaggcctctaactcagccccctgatgtatacaaacatagtactgaataagttccatattcaggacccagggcttaatgaatactggatgccccaaacataaccctgcagattattattatttccagtttcaatgaaggaaattatgactcagataagctaattgattggttaaaggttaccaagctagtaaattataaacccccaattgaaatccagtagccatgacttcctgttctgttatcattctttctttctatgggttaggatttagaatttggagacaaggataggtgagtatattagccagggtaacaatagaaaacagaattttattttattcaagtgaagatatggtattgaggagacagtttacagaggttacagatagggtaaagaacacctaaaaggaatgtggagacactcagtggtttgtaaacaagaaagctcttgctacccctaggcttaaagaaaaagggggaagggataatgttttggagctgaggggaaggctggagccatggaggaaggtccgcctgccggatctctagcttggaaggcttaaacactgacaggtgcagctctggagaagggacggaatggggaagaggaccactttctttgttcaggcatttgccaagttcaactagaaatagccagtgagggagaaggtgatagagttggtggggtctacatttcctggcacagaccagagctggtagtggggaagagtttggaaagcagtcaacacatagcaccagtgcctggtccttcttcacagggctgtgggtaaaagagccactgccttcctacccagactctatacctacagggggaatcaccatgaatccaagaaaactcaggcttcaggggcttttcccattatgtattgcttcaaaatactccaccccaaaacttggggggttcaaacaagaatgacttatgatttcttatgtttctgtaggttggccgggtggtctttctgctttttcgtggtgtcagctggagtcactcacacagctgcattcagctcggagctcagctgggtctgaaacatacaagccagccccactcacactctaggcttttcagttctctggcacagaaccctgatctctgcacatgatcttgtgtcattttatttcctagcctgaacttttttttatggtggctggcttccagaagggcaaaagccgtcaggcctcaaaagacctatgtcactgcctgacacagcattgcctctgcctcattttattggtcagagaaacttgcagcccagcccagattcaagaaaaagggatatagtttccacttcacgatggcaagtgcagcatgtgcatacagggtgggaggaattcttggaggcctttttttggccagtccaccacagtctgccttctcactatagcaattcatgcccttcttatgtggaaaatatattccccctcacacatccagaattttcatcccattattacatcaaaccaaaatccaataatctgtattgggctgagatgtgactgtggcacttcttgggctaaagaactgtgagctgaaaatacaaggtaaatcccactatatccagcatatgatggtgatataatgctaatacaagcgcaggatatttgcaataaacactggaatttaaaaaggcaaagaacaggaagcacatcacagttactggcccataacaattctaaaatccaggaaggcattcattcactgtgcattaagccttcctgggagcaaagaattttctgtgattagcatcaagctctgcctctgtgagggttcttgattcaagccagagatccagcaggtggaccttcctccgtggctccagctctccccttggttccaaacattatctcttctccctttttctttaactgtcattttcaacttttggttgattccaccttctggcctctttgctatgccctcagattcattcttcctttttcataagaaatggcccatgtttgcagctgaataactttctcagcttgcttttttccccgtagaaagcttgtgactcaaatgcctcttttcactttgaacttccttatccctttattcaacccggtagttctcccatcatgataattctctttaaaatattatgtgccattcattgacctcaccaagggttcactctgtgctccatgccctagcataattctttcagcaactaacctctcgctactttgcgtgtgtaaagcaacatcgctatgatttccaggacttcttttgtctgacttggaaggtctaggaaacattgccttgaatcttctagaattcttaagaaggtatccttcagccacagctttgatttgatctttacccgaaggcccatattttgtgaatctttgccacctggaaaactatgctgggggcccttacgttttcttcattttttcttgaaaattggccaattctttggctcctctctcctttgcaatgcctcaacatacattactaaaagaagccacttagcattttcaattttacctggccttagccaagttcacaatgtattcacttacctctccattctccgagcctctcctctttactctctgccttagtctttttctgttgctataaaggaatatctgaggctgggtaatttacagagaaaaaaggcttatttggcttatggttctgcaacataaacaagaagcatggccccagcatctgcttctgctgagagcatcaggctgcttccactcatggtagaagatgaaagggagctggtgtgcagagattgcatggcgagagaggaagcaagggttgggggaggtgccagtctctttctaacaacaagttctcacagaaactaatagtgaggattcactcactaccgggagaatgacaccaagtcattcatgagggaaccatccctatgaaccaaacacctcctaccaggccccacttctaaccctggaaatcaaatgtcaacatgaggcgtggtggggccaaacaaaccatatccagaccagagctccccctaacctgctacatgagctcaaagccaataccacaagtcttagacttttgtcatgacagcatgacacatctaataaaatttcattgtctgttgttttcattatctattgctgggcagaaaatcttccaaaaacttagtggctgaaaacaacaacaagtatttccttgctcatgattttgcaatttgtgcaaggctcagcagggttgacccaatgctgctccacatggtgacagttggagtcatttccatggctgaattcagctgggtgcgcctctgaagttgaagcatccagaaaggccttatctgcttatgttttgggatggtctagtgcaaaaagagctaagagaaacagggcctgtcacttgaactgtctgcttgcaagattgtggaagaggcactaagaagatagtcacctggtcatgttttgtaaactactaaagtgagacattttaactgcaatcaatcaggacttccattgcttttaacctgacataacattcatcatattgcaggtggcattgcgatggcaaaaagcatttttgggattcacctgagagaaatttgagttgggatgccttgagtttgcatttaatcaaatgtactttatgtaccacacatcctgtctatgcatattacattcttgctagctgttctgctgtagggatggctttcagaaatgtgtctactgcctacaatgcagacacaagtgtctcccagaagtcacatggtacaataagaacatgtctcatgtggcccagtattggggatatgtgaagagtggaagaaatttgaaactagtctgtggaaagttctaccaagtatcatagaccttgaaagaaactcaaagtttttcaagaccaacatcctaagaatttctataacgttaccaatcatgatttgggaagctgaaagaaactgtcttgagctatcaatttaaaaaaatcagtcaactatgccagagtttataccgaattatctttctattctttctataggaaatggtaacataaaattctttgcatctgaagatgtgataaaaagtatatagctaagaatataggaaaatattacagaagtgcattggggagatatttaataacaatattattttcctggagtttctgatgtttgtgggtatattttagcctttaaaaaattattacttgtgatttctcattttaattaaatactcacatccatacctaattttatatttgtaattgcatattcttttcttaaagagcacctcaaaatggcataatattcaagccccactgatctgggcccatgttcatacctagaccagaggcttcactctgaaaggcaatgtgaacatattaactaataaagtactggagttggtattatctcccagcatgaagaaatcacgttcagtgtaaaatgactcatctgtgttgcaattctggggaggatagggaatcagaggataccagagcgagataagacaagatgaggaatgagaacagctaagatgaatgtcaccttcttcagtggcttcagagacacatatgggaatggtaactttaggccacaggacacgctcagatctggtgaagatctggggacacagggagagcaatgctgcttataatccgacaataataacataactcattttcctgattattttgtattcggcactagcttgagcactttatatgtattaacgcatatgatctgcctaacaactctgcaaggcagttttgattgccatatccattttggaaatggaaagaaggcatggagacattcaagaatttgccctaggtcactctgctggcacctgctggaactggggttccatgagtccatctgctccagaggctgctggcttaacaactcacacctttgcatttgtatagcactgtgcagtttatcaagcaattttacatacagcatctcacttacagtcctaatagccctgaaaagttggcagggcagttactgttactctcattttgtgagtgattaattgaaatctaaaattgcaaagtgacttattcatcatcacccagctatcagtggtggtattagagctgaaagccaacccttgagtgcatttcattttctcacattgtgtattaataaatttcagctatagttatcttcaaagacatctttatgtataacgctaacacagtaccttccacaacttcataaaaaggcattgttattatcccaatgttaccaaagaaaaatatgtagcttagagaaacaagtcctggtggtatggctccaaattcacaagccacactctctcctgcacaagcagccatggccccggtctacctgctaaatcccacacaggacttggcccttccgatgctaggggaacagaagatggattcaacacctcaagacttcaaagtgcacagtgggttcaggggacattaaatagatccatgtgtctggagcatgaatatcaagttgaaaaaaatgggaccagatgatgggggctttgagtaccatgatgtgaacgttaatttgcagggagtgagcactgagtatacgcagatctgtactagattctgtgaacaaactgaatacataaaagtgtagtcttaagctgcaaactgtttggcctcttgtctaggaataacaaacctgtatgagagaagcaggaaaagaagcaacttagggccaggtgtggtggctcatgcctgtagtcctagcactttgagaaactgaggcaggcagatcgcttgagcccagaagctcaagaccagcctgggcaacacggtgaacctcgtcactaccaaaaaaaagaaaaaaatacaaaaattagctgggcttggtggcacatgtctgtagtccctaggctggggctggggtgggggtgctcaagtgggaggatcacctgagtccagggaggttgatgccgtagtgagccgtgatcacaccactgcactccagcctgggtggcagagtgagacactgtctcaaataaagcaaattagaagtatttatgaaagaacagataaatgacttaaaagacaattattataatgtccaccgtgttttaagatcatggaaccatacattaaagggaataatcataaccataatacttaaaatggccccaagacccatggaaaaaaagagccctgctttctctgtgtgtttcgttttaaggtgactgagcaggtgatccaggttgcagcttctctggtggccattcataaaggggaaaattctctttgaacccacagctctttggattaatttttcttcagctcctgaatggacaacaaccacaacaacagtgctgatagctgccattggctcatggcttactgtattgggtaactcacgtgtattacatctgatctgaagccactctgcaagttagatactggtacccccatttcacagatggggcagtgaagcccagagacattaagtgacttttccaaaggataaatcacagttaaacacaggtatagaagaatgtaagccccagaaactttttgctacactgtacctccctattcctttacccagaaaccagtactagaatttcattttctattccatcaaggctgagaactcactatcatgttcacagcatccacaactgagctgcacctccatagccagcctatgtttttctctgtagcctcttatttcaattctgctttcatgccaaatttattatcatttctcctcaaataccttttattcttatactgctaaatatctgtcattcagcaagtcctatttacctagattttatcaagtactgtactcaacatgtacaaaattctccctctctagaatgcactttcccctgtctctacccttcaagatcttatatatcctttaaggttatactcttacaggtcagacacatagaaaatgtaaacaaattgttactattgttattattattattttcatcatcagttttccaataaaactttgagctcctacaatgtctaagctctgtgaggtagcagagataaaattaccaataagccatgatattgacccccaggagctatgatcaggttgtgggaggagagggctatttggcatgagcaggtggtaacacacaatagagtacggtaggaacagctaaacgtgccatggaatataaaatccattttggcattctggtagaaggctttccagaggagatactagctcatgcctaatgaatatggtgaagttagccaggcaaatacaacttccatgttatggtaaccaattgaacccatttgctggggctgggagtttttgtgagatatggaactttcagagctataactgggacagtctggggcaaactcagatgattggtcactccattgcatgtgcaaagatgataaccatggtctggcaaaatatcttgaatgaacgcataaataaatggatgaatgtttcatctatccatgaaaaaaaaatatctcctaccaactgacctccttccaaatatttgctagccaacttgacctgagtctatgtagctctgccctgcaagttcccgtccactgtgaacattcattctggggtttatgtcatagcaagattttaacaatgaagatgcagctgtcaccagaaggtgggtggaggcagctctgggaaatcactttctctctccctctcttcctcccaagtctgtgtgcttcattaaaatatgtatgacaacatttctcctcatattattgtatcacaccatccttaattgcataattcaacattttcaagggtatttggaggaaatttggatggttcattgactattatttgaaggaagctgagaattaaatttaaaaacatgagggaaaattagtagtagaagagactgattgaagggctgacatgggcagactctgagcttttgggtcctgccccctctccactttcactgtttttgggtctttgggcctacacatagccgctagttcccagcatggtcccaggggacagccagcacaacctgccacttgccattcaaagaatcctgctgtcggtagtcctctctcccacactcccccgcccctgttgtttctgttgtccttgtttgtgatttttgacatgcgctttgcagattgcgtgtttttgcttgctctgttgaatgcacacgtccttggctgattgcaatcatgctgattgggagctgtggcccaggggccaggaaagctctgcactgcctgtgctgcggtggggcttgcttttgcctctctgccccactaactttcctctcccatgatggtttcctggagcttctttctggccgcctatgcggtgctgggccagtgtggtcgatacttgggagtaggctgccctccttctcttggctcaggtgctgagatcatgtgctgcagcctgggagtgcggccagaagaagccggcctggaaacagggttgagcagggtgtgggttgctcagggcctccaaggcccagggcaaacattcaagccccagactgcttcaagctggggagggggattgggccctccttgaggctcagcagaaggccccaggttaaagtcagcttcttgctcttgctcccagccaaccctaactgattgcttccgcagggaatgtgcacaatgatacatttgacttcattggtgggatggatttgctagcaaaagagactgctggagggtgaaagaggtgtcagtttatcaaaaggatgttgagggtttgaaaaatgattgcaagaaatctgaattcttttccaactctgccgaacttgagatgtttggctaaattcaaagctgaactcattaggattgaaggaaagatgacttctgtggaagccagtgaatgtcccttgatgaagagctcagaaggaaacagatctctctcttcccacatctcccctgccactgggattttctgggtgcagttcccacagtgtggctagagagtaagaagcattttagggttctttccagttctggaatctagaagtcatagctgagaataacctagacagcagcttttacacccccttcacctcaaaggatgatgcattcaaggtcctgcggacagtcagctggagttcagccccatgtctggtgatgctgcatctgtgcacctgtcccttggcagcacttctgcaaaccctacctttctctctgggtgatgatgctcacctgaaaaaggtccaccctttgtgatagcactcagcgtcttgctgcagacaaagcagtgggaaaaatccctgggcaggccagggccggcacaaccgcagccaaatgtaaaggccacaggggccacagacatacctcatccccttcattgctcccccgaagggtccaccagcagctctgggagccataggctgagtgagtgaagaagagcaaagcccccttcactgggaaagtcattctgacccagcatcttcatcagcttatttgggggcatttagcttgttccagttcaataatgcattcaataaaaccgttagtgcctgacatgaatcccaaatgggtgtgtggctgccaggcatgctggcccagacagcacctcctccccctatctccttcaaatgaaagccaggtgatattaacatgattagcatggataatacgaaaaatgacagcaacttgggaacaggcacggagagattttgaggcctcagaagacagcacaaccaaccacagaactcaaaccagcactggaacctcaggcctctccctctggcttcctactgaacctagatgggaggtgctgttactgcattctctctagcaggaggtcgataattcagggattgggctttgcttcacagtgaggctgttcaggttttggaagagaaagtcagctctatgtgatcttctgtccacagaggaaacccctatgaaatggggcctccatctcctgcctgtctatccgtgcccctagccctcaagtttgcaccatagattactatttcttttatttatttattttttcaagaccgagtcttgctctgtcacccagcctggagtgcagaggtgcgatctcggcccactgcatcctctgcctcccaggttcaagcaattctcctgcctcagcctcccgagtagctgggattacaggctcctgccaccatgcctggctaacttttgtatttttagtagagacggggtttcaccatgttgcccaggctggtcttgaactcctgacctcgtgatctgcccgccttggccttccaaagtgctgggattacagacttgagccaccgtgcctagcccataggttactatttctaagaggccctttctgagagtctacatgatgtgtggtgcccatgttgggagtacaaccacattaaaaagtgcctgtgggcaggagcagctttgaccagagtgtaggatacagtaagttcctcttcaaagcttagcctgttaatttcctttaaaattcaagagggagaaaattgttaagtaccatgagttctgagtcttctctccaaagaaccaatgtatcagtatgttcagcttccctgttctttgttcttcattttaaagcttgacttccttgttctttatgtctccttgcccctagtttcagtaaacaaccccctcctagcctgtatcacctgctctgtccttagtcatccttagtcacctgttctgtaaccatccctcctgccaaaactactcacctcgccactccggctcatacccttgctctctttaaaatagccagtcagaattagcttagactgtgtggtccaaccctagccaacagaggaaagactcagcagtagggactagctgcgttaggaataagacctccttcccctcccttgtcaggtgtgttctctccgtttctccatcgctccatctgcgagatgtacccttctacagaagtaaattgccttgctgataaacttttgcctgactgctattttcacttggcggcaccaagcatttgcttccaacgggaggttggaagtaagggctctgcagtcagacagacccaagttcaaactctggctctaccacgtactggtaatgggacttcagacagaactgagctttagttcctgtattctgtaaaagagaggtaaggatattacccaccttccagagtggctgggaagaagaatacacacttggcttggcatgtagctaacatttattgaatgcttattaacattactgaaatcatacttttttgtactgttactttattgatttttttattatgatggttagaagtttcttctgaatcctgcaaatggctctgacctctactcttgcctatgacctttccttccttttcttccaaacatacacacacgcacacactcacacacatacacagagcaagttattgcccattacatctgctctttccctctgatcttgtttcattaaaaatgctaattcccccagcctgccttccatcttggcatttgcatatacatgagcagctcattcctattctggaatggtggcctctgggctgatctggggcctgaaagggagctctgttgggaagggctggggggaagccaggcccaaagctgccaggagggggtggccacttgctgggctcctcatttgatctcctttattcttgcttgccctctcctggaggcacctgctggtaagcaggaggatgccagctcatgccacggggacttctgcctggcattgtcttgccagtgtcagttccaggcaggagatgtgacctatgcaccctacagtggcaggaggctggtgctggcactgccttctggggaggcagcatcacttggccaagcatcccccgggacattcttttccagcacttggaggcacactctggagtccagtcgcgttaaacaataaagcacagtgattatgacagctctcggagcctggaagacattatgaccactaagcgggtgtccataattcgataggaaaatgtcaggaaacatagattcgatggttctacacattcattttggagtgagtgatgtggcagacaaagaaagcattcttgagatccatgcagtaggttcaaatactatcttgtcacttaatagctagatagcctaggtactcattggctcagagcctcggcttcctaatctttgatataagtgtaatgatgactccttcatagagtgagaggatgttgcaacaggaacagtgcctgctcacacatccgccccccactccccgtcatctccgctgtccccagcccggtctgagccactttcctatccggacacttcaactgcctgcagaaggtctccccacacttcacttttgcttctttccaatccactttccacaccatgacgaaggtgcttgtaaaaacacaaatcggatcatatcattttttcctgctttaaacactaacctggctttcccttcttcttgaggaaaaaagttcaaatatccctaactcgtcccctgtgactcctccagtctcatctcactcactcctcccctgctaacaattctccaccacacagaccttctccagtgttattaatacgctaagtttcttctgcatcagagcaaaaaaatcccctgagctcccaagccagattaggttccccttcacccgcgtcaatgcgctctgcatttaccctgtgggtttagtgtgtacttctgtgtcagttgtatctacacgtctattattttgtttatcttttattattttaggaataatttcttctctttgagaagccacatcactgccaagaaaacccctgggtgatgtgtgttccggcacaaaccaagggacaggagggctgtgtgtcactgcaaatgctgggtgcagtgtgtggtccccccatgcctgccctgcaagtgtgttgccctaggtctcaggctgtatggacctggccctgtgggccttctcactcccacgtgacatcagtggccacgggctccaaaccccacagtccctgaagcagaagttctctctcattttttcagaggaggcgggagagaggataagcaccctccagctgagaagtacgcggactcaagctcagagcagcttccactccttcctttctctctttgaacaggttgtacattttactggcacagattagaactttattcccagaatcattaggatctaagatgtatttattctataaatatttatgaagtaattcttctcaatgaaccctgttccctgtgctttatttttatctgcttattatctcctttaagtctcacaacagtcctgctaggtaagtaagtatgctgactattaccttcattttacagatgagataactgaggcatagaaaggtgaagtcatttgcttcagaccctatagttatttattatatatatatatatatatatatatatatatatatattttttttttttttttttgtattatactttaagttctagggtacatgggcacaacgtgcaggtttgttacatatggatacatgcaccatgctggtgtgctgcacccattaactcatcatttacattagctatatctcctaatgctatccctcccccctccccccaccccacaacaggcctcggtgtatgatgttccccttcctgtgtccaagtgttctcattgttcaattcccacctatgagtgagtgagaacatgcggtgtttggttttttgtccttgtgatagcttgctgagaatgatggtttccagcttcatccatgtctctacaaaggacatgaactcatcattttttatggctgcatagtattctatggtgtatatgtgccacattttcttaatcctggattaagaaaatgtgaccctatagttattaagtggtggagctagaagtcaaattcagatggtctgacttccagacctgcctagttacataaccacaatccaaattcagatggtctgacttccggacctgcctagatacgtaaccacaatccaaccagagggcagcaaaatctctgccttcaaggggtttgcattctggggagggtaacagacagcttaagggtgaataaaggcaggaagcaaatcctgtctgtcaaagagtggtgagtgttgtgaagaatgtaaaggcaggaggggcagcctgggggctttggcagaggaggcgatagctgttggtagggtggccaatgaaggcccctctgaggaggtgagtttggggcagatgaaaaggagctgtctgtgtaaagagccaggggagaatgttccagccaggagaaggggttgaggacatgtttgagaattgctcctgggctggagcctgggtgtgaggaggaacatgcaggagatgatgcttagagacctcaggctctattctgagcatactgggagctactggagggtcttcaggagagggaagctgtgatctgatttatatgttcaaaaggtcaggctggctgctttttagagagaccaatgacaatatttctgctagtccaagtaagaaacgatggcaaagggggctgttgcagtgaaagcaatgcaaaattgggtagatcttgagtgtgctgtaaaggtccagttacaacagcatttgttgcagagttggatatggagggagttagagaaagcaaaatcactggcgattgcaagggttttggcctgagcaactggttggatggtgacaccatttattaagatggagaataccagaggaagagaaggtatgtatgtgtgtgtgagtgtgtgtgtgtgtgtgcacatgtgatcaatggatgagcctggaatcaacagttctggtatgaaagtgttaagtttgagacatctgttagacttccaacagagatgtcacagaggtgactgggtctatgagtttggagttcaagggaatggtgaggctggaaacatcagcctgtagatggtattaaagtgcccaactagatgagtgctcacagagagagtgtggagacagggcgtgctgctgaggtcccaatgtctgtgtcccctcaacattcccatgttgaaatcctcaccccccagaggatggagtttggaggtgtggtctttaggaggtgattaggtcatggcagagaggcctcatgaaggcatcatgattgctgcccttatgaaggagcctcgagagagagagagtccttgctgcttgaaccaggacgtgggatctcactggacatggaatctgttggcaccttaatcatggacctctagccttcagaactaggagaaatcagtttctgttgttgaagacacacaggttatggcatttggttagagcagccaaaactgaccaagacctggagatctgggaaaaaagggagaagagaccagaaaatgaggctgaggggaggcaggagctgggagcgggggaaagtgctatcacagaggcaagttgacgaggggtgcaagagagtgaggagtcggggcccatgctgctgcattccccggcgtctctggcatcctgacccacaccccaggctgacgtggatgcatatcgctcattgcctgctcacacatgtcaggcatttgcttgttgttgaagtcatcgtctgtaactaaaacgtagcctccaaaaggcaaggacttttgcctcccttgtttattgacagatagatgtatccttggcacccaggaccagcccggcacatcagagctgtgtaacacagcatctgatcgaatgcttttgttgcctgagtgcagggtggaggacgagagacctgagatcaaccttggctttggcagggcagaagtcatcatatccatggcgagatgtgattccctctggctgatggagatcaaatcctcactggattctgttcaggagacaagggaagatgaggaagtacagacagaggaaacagacaactttctcagggaggtttatgggtcagagaggagagggactgcagtcagggtcagggaggccttggctgttgcctctttatctccagatgagaggaaataaagacatttgtgtgcagagtgtgcatgcccacaggaactctccagtaaggggagccgttgatgatgagggtacaaaggaatgagagctgatgtcctgtgcctgggggaaggtgtggaggactatgcaatcctgtgcacaggtaaggggctgtctgcaggtagaccagcttcactcagcagaaataagaggagaggttagagcaggaacatgcagggtagatctggggaggataaggttgagtgttgcagtttccatctgattgtttctggctctgcagtaatgtaagaagtgaggtcctcaccgaggagggtcagagacagcagaaggtggaggaaaggagagcaggtgcaccaggaaaacggactgggatcattgggtcgtgtcaagtccacttcatatttgaggttacaatttttttttttttgagacaaggtcttactctgttgctcaggctggagtgcagtggcacagtcatggctcactgtagccttaacctcccagactcaagcaattttcccacctcagcctcccaaatagctgggaccacaggcacactccactatgcctggctaattgtttctcttttttttgtagagagagtctcactgtgttgctcagcctgggctcaagtgatcctccttccttggcctcctaaagtgttaggactacaggtgcgagccaccacgccccactgaggttatacatttaaacttaagctaagtggcagggttgtgcgtgtttctttaatccatttggcttctctattagaggtgaagttaactggggtaggaattaactcagatgccatcaccaacccctacactgactacctttgttagggtcattagtgctttaaggccaggcgggtcagagcatgaagtccaaagacatggccttataagaattggattccagaaaaggtgctgatccagctgtctctgacccacacttctgaggactgctcatccagggctccctggccccaccagcttcctccaggcccctgcttctggacactgtggcttgtccctccacatccccctgccagtcccctttgagccccaccagccacctctgtcctcacccttcctatctctgtctcgcacagcgcatgcctgaattcagcctgtttgggttgcctgttcccactctgacttgcaaatgcagaccccttgggctcacattctggagaaaacataaacacctctcctctgttggcatggggataccctcaaatttggtggctctcggctgcccccacctgccataaatcagataggaccgcagctacccagctcagccctggtaaaccccttggggcttggcaggaatggctttcccggatcgaatttcttggcagagaattggaagggatttaaaataactgagcacaccataccacccgtttccagctccaaatagaatttggagtccatttcacacagcgctggggttctctcacccacagatggtgttaccaaaattgtgtgtgctgctgctctgtttgtctctaggcttgtctacctcgacctgcactgctggcctttccaaactcttcctggcctgcgtgctccatggccatctgggtgtcagcgtgccctcacatgtctgtcagctgccagactccctggatctctgtctattgattgatctgtaaatttcccgcactgtgcatccatcagccgtccaccccctccactcctcctgcatgcacatatgcctgcctgcaccccgctccagcctggaggaagctttctctcctcttttggcaattggcggtcatgtctcagaatccacaatatgttgattcttttcagaatcaacacaccctctcctccgcactatctgacctggctggacaacaggcagaggctgttgacatgagttgagggtgctgctctataccacagtggggtatactgcaggggaaagaggtgtggtctcagagtcatgaaacctaccttctacttgaccattgggaagtcacgaatctctgagtcattctcctcatctaagaaataggggtaatattacctgtcccacaggagtggtttgaggatttgatgatgtctctgtgaagctcagctcacagcacaaagtagggatttaaaaatgctctttaatctgtggtctatggtaactatcaaacaagtaatgctaacaacgatcatttattgaataattattctcagtgtgttaaggactttatatatttcattgtgtttaatttttgtaagacttaatgactttgatcatcaaagtatggttccccaaacagcagcctcagcattacctgggaatagttacaaatgctgaatctcagtctccatcaccaagcgttttccatcagaattggcattttaacaagattcccaagatgttgaaagtgacatcctgcgattatttacccccttttcacaggtgaggacactgagacctaaactgggtgcataatttgtcctggatcacacagcaggcagctggcaaatctaggttctaaaactggcttcccagatatcagtccttcaccaccatggcagagtgtgttaatcagtgttcacactcacgcacatgctcacacccacggaaaggacacggtggccactcagcaggttcggagcccatgatccgaaatgcccagggtgcagaagacccaacccagttgagaactatcttctccttccccagaaggaagtgcagcagcaggaacatgagaatgcaggcttctgtttaactagctgtgtgatcccgcgcaagttacttcacctctctgggcctctatttcttagatttacaaagtgggatgatttgcccagatgtaacagtgtgcctctgttattgcccttttgtctcgttggtgattctgttttgacaatcatacccataagaagcctgttggtgtttctgtctgatgtcagttatcactccgggaatggagttaggatgagggggagagagaagaggatgtaagaggttgtaagggaatggttgaattaaacctggctttccttaaaatgactcattctcaagcatagacaaatcagggaggcctgtgtcaattactccttgtgattattcccgagcctatttgtggaactccaggccctttccgtacctcattcggagggcttttctcagggggtttatggaccaaggacatctggtgcctgaggctttatgtctgttggtgtgatcatccaaactggggaagggcctataacactccaaatgctggtgcccgaatatctttaattccttctgaagggtcggggttatttctccatcgggagcactaatgggattctaataccctggcaaatgggattttttacaactgccattctgcagttactgagatggcgtgtcgctgggacagccctataaatcctgtcaactcactctgaggaggaggcggccacagggagaggtggctgcttccagtgctggcagcctggggggccctctgaggggtgtccaggttctagttctcaggatgagttactatctttgccagggagagatggtaaatcatgggaatggggcagggcacagccctagggcctcagagaagccacaggagtttgatgggaaggaggcagtaggcccctgggaaaagtgctcttcacttcctctccttttgcagtttggttttccaaggcctctgtctctgagggctcatggacacaagacctaaggatatctaccaaaagcaggtacctctgtccttttaattccaggggaacagggcccagagaaaaactcacggtagatattaaggaaaaggaaaatgcaatacagcccatctttatgttggagttaaacttgatgccccagggtattgttcccaaagacagatatttacatagatatctcatgtgcagatgaatgactctctaagcctgggttctctgtgaagccacgtcccttatatcggtacactgtttacagacaacctctcattttgatcactagaataaatcagaaggattgaagggcaagattattttctttccacttcagggatgaaaaataacatggcaggccttaaacaacttgttgcagggaacctaagttgaaatttgctcagtttttaatccatcttgaattgatttttgtataaggtgtaaggaagggatccagtttcagctttctacatatggctagccagttttcccagcaccatttattaaatagggaatcctttccccattgcttgtttttctcaggtttgtcaaagatcagatagttgtagatatgcggcgttatttctgagggctctgttctgttccattgatctatatctctgttttggtaccagtaccatgctgttttggttactgtagccttgtagtatagtttgaagtcaggtagcgtgatgccgccagctttgttcttttggtttaggattgacttggtgatgcgggctcttttttggttccgtatgaactttaaagtagttttttccaattctgtgaagaaagtcattggtagcttgatggggatggcattgaatctgtaaattaccttgggcagtatggccattttcacgatattgattcttcctacccatgagcatggaatgttcttccatttgtttgtatcctcttttatttccttgagcagtggtttgtagttctccttgaagaggtccttcacatcccttgtaagttggattcctaggtattttattctctttgaagcaattgtgaatgggagttcactcatgatttggctctctgtttgtctgttgttggtgtataagaatgcttgtgatttttgtacattgattttgttagacctaaaaccataaaaaccctagaagaaaacctaggcattaccattcaggacataggcacgggcaaggacttcatgtctaaaacacaaaaagcaatggcaacaaaagccaaaattgacaaatgggatctaattaaactaaagagcttctgcacagcaaaagaaactaccatcagagtgaacaggcaacctacaaaatgggagaaaattttcgcaacctactcatctgacaaagggctaatatccagaatctacaatgaactcaaacaaatttccaagaaaaaacaaacaaccccatcaaaaagtgggcgaaggacatgaacagacacttctcaaaagaagacatttatgcagccaaaaaacacatgaaaaaatgctcatcatcactggccatcagagaaatgcaaatcaaaaccacaatgagataccatctcacaccagttagaatggcaatcattaaaaagtcaggaaacaacaggtgctaaagaggatgtggagaaataggaacacttttacactgttggtgggactgtaaactagttcaaccattgtggaagtcagtgtggcgattcctcagggatctagaactggaaataccatttgacccagccatcccattactgggtatatacccaaaggactataaatcatgctgctataaagacacatgcacacgtatgtttattgtggcattattcacaatagcaaagacttggaaccaacccaaatgtccaacaatgatagactggatgaagaaaatgtggcacatatacaccatggaatactatgcagccataaaaaaagatgagttcatgtcctttgtagggacatggatgaaattggaaatcatcattctcagtaaactatcgcaagaacaaaaaaccaaacaccgcatattctcactcataggtgggaattgaacaatgagatcccatggacacaggaaggggaatatcacactctggggactgttgtggggttgggggaggggggagggatagcactgggagatatacctaatgctagatgacgagttactgggtgcagcgcaccaacatggcacatgtatacatatgtaactaacctgcacaatgtgcacatgtaccctagaacttaaagtataataataaaaaataataataataaaaaagaaatttgctcagttaatactcaaccccaaaattttgtaatttttaaaccccatttgtccccttgcctctacaccatgtcaaatcttccaggaggatgccagctgatgctcctttcctcctcaaggtcacactacctcagatggaaagcttccctaatgactgttctgaagttggggctttggggttgcttatgggctagaggtttccccaaagaccacttggttttggtgccactctgcatgggctcactcccaataactccgctttggtctccctttactctgtcggtgtccaatgtctgtaaattctcactggttttgcatttcttttcctaacttcagctgccttcttctcccagatacaggcagattcttccctggccttacaatgtattaatacaatgagcacctcttatccttaccagaatgtaaacttcctgaaggcaaatcttaagcaagcagttgctgagtgaataatgcttgcctaactagaccctgtgagagacaggaagacatagaagacccagttctagtttttgaggaacttacacatttcttggtgagacagtttatctccatacgttaaaaatctaagtgatttcttactgttttctagttctttaccacacacaacagtttcaccgcagtgtcttagtccatccttccattaatcatgagaggaggttgggattctaattctttctttagagataagaaaatagagctcaaagaggtaaaggagacctgtgtaactagaaaactgtttaactgaaggttcatgttcctcagcccattgcttcaagtagcataagactggtagaataagatgatgccaattttcatgatataaagacacatatctcagggcatcaaagcaagaaggaaatgactgagcagaaggattagaaaaggctttctgaaggaggtgatctcgggggtgggccagaggccagtttcccacgtctctagagtttcttctccttgtctcagtagctgagctcctggcggtgcctgtggaggaaaggtcatgggcctggaggccgcatagccatcatcaggttgaaatttacatgcgggatgaagcaacacaaactgtcccacttagggggaaagctgtgtggctccatttcggagaatgagccctacactgtgtggttcttgtcactctcgcatccctccgcctgccttgcagctcatccgcagcgggctttctactcatcaccctggctccctggccctgtacttcccaccacttcagcccagagcagcagggaatctgccaggtgaaagcaaaacctgctccaagcccagtaaagtacctctgtctgtgttttctcagcatagatggagagtggatgggtctgcttaccaactgccctttcatgtttcctagccatccaaaggacggtgcttggagccagacagatttcagttcaaatccagctccaactcttacctgttacaagactgtggtcaaactactaacttcttctaagtgtccaataacttcagccttaattttttaaaaattctaaaaaccaatttctatctatcatatcacttttatgatcatttgatgattgttgcttttattttatgaccactagacgtttataaaagtcctgggggcctttgtaactggatgaacaaatgctcagctcatcctgtgcccatctctttctgtctgctcatttccccagttttgcagtcaaggtttgtgccccagttggagtccaccgggtctgtgggggtgctggtgcagagctcggccttctgccccgtcctggcttgggtgggtctgcacggccccctgggccgtgggaagagctccctctgcagcagccagtgcctcttgattctctggaaggagccagcagccatctgtgtggaaggacagggccatactgtgtcctaaccttggttctgcctccaacttaaagtgcggtttgaggaagtcaccctctcgggaactccagttcttcaggttaaaaaaatggattttgaagagactaagacctcttcagggctgttggccaaattgagggggacagtgtcctgtgctccaggccacgtgatgagtggtgcttctaggagctcatcgtacactcctctgagacctacaccacatacagaggcatctgagcagggaagcaggtggttggtacacacgggttccttggaccagagcagagattcaggaggagccaagccatcccctcaggccccagccaggccatgagcccagcaggtaaggctgggacaccagccagtgggaagagtgcagcagtgccatgccctaattgaatcaaagtctgactgccagagaccctctgtcttcgcctgccgctggccagggctctcatgggattcatgctattaccctgtcaactccagcacaccccctcatttccctccctgcttaagaatggtttaaatcagcaatgctagtgcctccaaacttcaatctgaagcctaaggtctcatgtaagctagactttgtgcttgcacttgacaaacaaaacagaaaccccgaggttatacatattacgtgactgggtctcatctctgcttaggattgattttcctccattcccagttgcaggacaccagaatgatgggattattgtcttgggcaatcacactgtggcacctggcagctgcgtcctccacctcctttctgtgcatactgctaaataggcaacatctagttccattcggaccccagaatcctcagctcttacagcacaaatggggcatttgctcaatcccattgtaactgaaagcactttgcaaagccaatctctgtgtcagagggcgacctttcaaaatatgaaagcggaagagcctgtccacacctgggatggcaggtgcagggcccggcccctattctatggtccagaatttccagccatagtgaagccagcgccacctgctgtctagacagatcgccactgatagtggaagggaaaagaaacagcacagggtctagacaggtaagcacctactcaagtaccgagacccacaagttccaaattgcgcattccacttgctaattccaggcctaatcaccaaagctctcctgcatggaccatgagccttggggacacgagtggatgaaactgctcgacttcttgttgtgtgccagtgggtgcatgcacacggtggcatgtactgaattgattacggaaaaatcatttttgagttggttcttttgtctctcatttgttcactttctgaatatatttaaaatctttgtccatgtccttgctgccagctcctactgcaaggcctcagtagaccacgtctgctccccttgctctgtgctgcccttgctctgccagcccaggcaggggctgtcctcaaaccagagcctggagacaggcccatgtgatctcacctggatggaaagcccagaggccgactcccacagctgggtgcctcctggaggattcccacccaccagggcagaagccaaagtcaaatgccagggctgtgctcctccctctctactgccctcagtttctctcagctaggcttctcctgttccccccacagcagactcagcccagttctgagctcctgagctgatggcagcagggagggatggagaaaacagagcaggccgtggaatcctctcccagccccagcatgtgctggctgggccacgggatgcctggccttctcgcttccactctctcgtctccttagccaccttccagaccaagatccatgacgaggatgcaggcagacccccagacacctgtgtggttcctgaagggacagccccatgccccccaccctctccctgtcttgactcaaagttgcttctgcaaagtttttcctcccttggtcttgatcaatggctcaatttagcacccgattattcagtcctacgcttggcaccactgagatctcgggacatttcctcttgttcttcccagccccttcttctccagctgcacttaataccttgttttgctccgtgactggatcatttcagcctgtgacactgcatcctcctcacattctccaggaaggctccatggctccccgtccctgagcttcacaaccttcactgtgtgaacgcgtaagctgtggcccttccgtggctgaaggcctgaacccaaagtgcaaagtgagatcaattctttccaccagtagatcctgctttccagacaaaacaatataaactatcattgctgttgccaggaagcctcccttcacccacagtttggaggagacattgtgtcaagccctcagagtaggagttacaggctctgcacccatcctctggggtttccataggaggcacccaagaggtccacagaccacagagatggccaagccagctagaccggaaatactgaccaaagacagaaaaaaaaagtcctttgaaaacaagtcaatgtcagctcctccctgagcctgtgacatgaggggaaggtgcaggaatttcaagtttcttggagacaggattaaggactgagagcggcttccttcccaagtccttcttccactgtcagatacagggaagacagaatgaaaagactgatatgaaagcgctttgaacttttttaggctcaaaggagctttaaggatctaaagcattatgattatcttttagcagtgtgataatattgattatacaggggcctggtggagtgtccctggctgcatccacagagtccttgggagctgaaaatatttataagtattgttgtgtaaaggtccctggcagactgagattcagaaggagattcataaaggtagtgcaaggccccgaggttaagttttatcttaattatgtgttgggaagtggctttccagggtcagagccccaggggaagagaagcaaatgtcccttcccagcagaccctcaccctcctgacagaagcatgctctgtgtcatctttaccttggcttctgcctctggaatttatgcttctaagccttggcctaaggcttcaccaggagaaattattattaatgataataataataatggtaagtcagctgacagcgtcgctaatgtcccaggggagaaagcataagaaaattgcctctcacataaacactttctgctatagctgctgaggtgggaagagcacagatttcagagtcagagaaaatggggtgcaagtatccgccctgatatgtccagtctctggctaggcccttgacttttttaagttctcaagttccttatctgtaaatgtaggtaatacaaacatctacttgatagtgttgtaaaattccaaggagaaggaacattcagctgagtgcccagcacgtaatggccgtcaagtgacattaggtattattaatattggccttattggcagtctttagaaagcctcagagtcacctctcaataattttaaaaggcagatacgggagcccacacccaagatgaatgaatccaaatctttaggaaggtggaattcaggtatctgtattttccttactgtattatgtgttacttttttaaaaaaattaaatttgttttgtgatttatttatttatttatttaattatttgagacagggtctcactctttctcccaggctggagtgcagtgacacaatttcgggtcactgcagcctgaactcccaggctcaagcaatcctcccacctcagcctcccaagtagctgagactacaggtccctacaggtccatgctaccacgcctgactaagttttgtattctttttgtagaggtggggtttctctatgttacccatgctggtattgaactcctaaggctcaaacgatcctactgccttggcttcccaagatgctgggattacaggcatgagcccccatgcccggccttgtattttatatatacacataaagagagagggagagagacaaggtcttcctctgtcactcaggctggagtgcatggcatgatcacagttcactgtagccttgacgtcttgggaacaagcgatcctcctgcctcaacctcctgagtagctggaactactaccagcatgtgccactatgcctggctaagttttataaatttttttgtagagatgaggtctccctatgttgccctggctggtctcaaactcctgggttcaagcagtcctcccaccttggcttcccaaagtgttgggattataggcatgagccactgcacacggtgagtgttacttctgattctggatttgtaccaagaatcagaaccacttggcctcacccacagtgtttgcaaggctgcacgtagatggtgcttgtcaattacctagagtggtgcccagaactcagcgtggggaaatcgtggcattagagaatgttctcggagcccagtcctctccctgtggtagatggcctttcctgcctccatgtgagcagttaatcacctgcagcagcaacttggtgctctatcctcccccagcatgaacatgagccgttacatgttggggataattgaaggtgaactacagagctggatggactcccctgtccagaaaacaagtaaccaatgaggtaggagttctacatgggttcaaggcgagaattgtaaagatcgttttctgctggtgctagggacattattttagggatgtgtgattctggccttggaagccaaccctggttcaaagcaataactcacatgtaataaacttacagagttatgaccctaggatcggagattttctcttgctcatctggctactttagctgcatcaggtgtttaagtgtagaaatgagaaacgtttcagggagattgcacatacaaagcttcctgtggatgcccagcctaatttacagtcatttttgttaaattatcatatgtactaccatggtaaggctggaaaacgagtccattctctgcttagcttctaggtggagaaatagtcacaaagataaggcttttgcatgtggacttatatggaattagggtttagaaaatataaacaacttgctaaactttgtcacttttccaatgagctaaatggaacttattcatccccttaataatgatgtgtatttgttggggttttaaaagtaaatacactagctatagagaaagcattacttgagtgaatggatgtcctctaatcaatgtttgatttctgaagtatgcttttaatttctcaaagtgcttttacatatattatctcatcgatttacacaatggtcctgtgtagcagagaagcaggtattatgtaattcctatattctatacatagaacagatgcttagtttattaattcaggggcgtgtagtacatttctagggcttctgaattcagtcttctgaatctcaagcctgtgccctttgtgcaagttgaccctgacccttttctttttatttttttattagatggagtttcacttttgttgcccaggctggagagcagtggcgcgatctcggctcacgcaatctccgcctcccgggttcaagagattctcctgcctcagcctcccaagtagctgggaatacaggcacgtaccaccatgcccagctaatttatctagcagagacggggtttcaccatgttggccaggccagtttcgaactcctgacctcaggtaatccacccacctcggcttctgaaagtgctgagattacaggcatgagccaccacaattggccccctgaccctttaaaaaagttacacctccattgtgagaaaatatgtattgtattaattgggcattggaggtggaggactggaaaagcataaaagcgtttcttgtgtgactgctcagagagaaggtcgtttctttgtctctgtctctctctgtttcactctcatccttagtggtaacgaatctttgtgcatcctcttgggctcttttaagtggtttccacagtagatatagggccactttagattgcatttcaagattggttgctggagcaggaaaagagaatatgacatatagagtggctatctctactgataaaataagatgggcatgggggaagggtcaccaatgggagtggctctaggcatgcttcaaggaagaataaacagcctgactgggaagtctttcccagttttgcagcagacttgaatctttttggtgtgatcacaatgtctgacttctcattgcctatgctgtgtgcaaggtctgagctgctgattgggtctcattttacagatatcccaatcatgacctccaaatggatgcctgattgtgtctacacccaagacattggcaaaagattctgaataatgtgtgggaaattcagaatctggctgcctgaatcagatgtgaaacaaagactccagggtctctgtactgaggaccacagactcagaaactccctttcctttttactgtcacctccatccttggttacggcatggcctgaatatcagcactgagtgcatcccgatgttataattacaagaggaattattatgaggcaaaacaataggcaggctggaaaatgggggagtagaggcctgaatgagtcctgcttctttctgcttacttgtcaaatcctgtgtctcagatatgccctctccacagccatcctaattgataactcaagcatcactcttttttttcccttcttttgtttttaagctgataagtgtggaatccagactctggtctagtttcttctttgtgtctgctctggctcaggcagaatagccttctagtccgcagcatggtctttgaagagactttacaagattcctgtacctgtattgacctgccttcagatgttggatctaactagttcattttccagccagcccccactcttttgaacttcccttgcttgctttctcattacccacccctccctctagctcagatacccaatgttgcatggtccatctgtaccactcaatattctggatatcagcttagccattcaacttagcactaatgcaaacatcctcatttacatggaatgcacagaaggtgacattctgtctgtaacaataggttataattatcatgtctctcatttgtattccattttatagcttcttgaattgttttcacacgcataaccccatttgattattctcagagtgttgagaggtgggcaaatattctttcattccttcactcaccaaatattgattgaggggctggggaagccaaggtgatgaagacaggcaggcatgattcctgtcctagtggagcttatattctagacaaaatggattttgatttgacagcgaaacggaggctcagggaagttaaaagactcgagtcacccatgcagtaagtgcaagaatggggactggaacctggatcttcagatgcttaccccagggctccctctaagtctccttgctgtttctcagaggatgcaggaagtcctcattctgcacgtgggctgtagttcagaagtcctttttttaagctgagtacttagaattcagtacacattttcccatagaaattatgttataaatggttactatgctacaaggccatccaacaaaagcccagttaacccattgaacccataatgtagctgaagcatgctattaataggacaattccttccactgctacaccattggggaggaatttcactggactcattcaaaattgatgctgtgtgaataaattcactctttggcctttggatttcctcagtgactcactgtaggcatgacactgtgctggtgtaaggggctctctttcctccatttgcatactttcctcatctttcctgctttctctatttttgtatgtgttgcaagaagctaatgtgtataagcaccaggcttcatttgtatggattgcatgctactaaatgagtaagtgcttgtctggcttaaggacaaatatatggctgtttccatagatacccgaccttaataactaattaggacaacaacacattttccaaagcctatttcagggcatctcagatacagcatcccacaaatgtcctgtattgtaggtgcattttcctttttatttctctgcagaagtatcaataaacaaactataatgcctttagtagagactaaatgaatagaaatgagttttacctggtgatgtcttgaagtagtgctagataaatagattatgcctcacctgctcttctgaacaagaatcagatgcgctctcctcagggccacttcatgaggagaagccctgagtttcaaattgagagccaggggacatatctcttctctcttattcccttccactgccctcttctcccatttgaggcttcactgggacctagaacctgcttgttagggagctgtagagttagttatgaccagcccaactcttctttactttcaggtcttcataggaggctgcatctttagttttatttctgggttagcacctgagaggtgaacctgcttgttagggagctgtggagttagttaagaccagcccaactcttctttactttcagatcttcataggaggctgcatctttagttttatttctgggttagcacctgagaggtgaacctgcttgttagggagctgtggagttagttatgaccaacccaactcttctttactttcaggtcttcataggaggctgcatctttagttttatttctgggttagcacctgagaggtgaacctgcttgttagggagctgtggagttagttatgaccagcccaactcttctttactttcaggtcttcataggaggctgcatctttagttttatttctgggttagaacccgagaggtgaacctgcttgttagggagctgtggagttagttatgaccagcccaactcttctttactttcaggtcttcataggaggctgcatctttagttttatttctgggttagcacccgagaggtgaacctgcttgttagggagctgtggagttagttatgaccagcccaactcttctttactttcaggtcttcataggaggctgcatctttagttttatttcttggttagcacctaagaggtgaacctgcttgttagggagctgtggaggtagttatgaccagcccaactcttctttactttcaggtcttcataggaggctgcacctttagttttatttctgggttagtacctaaaaggtggtgaatagagtcttcaacttctatcgtcgtcaacagttgcattatagaatctccagataataaaacatcacatttctaagtgacctagaattcctttagcgctggcaaagaagggacttccaaaaataataatatatattaaacatctagcacatggaggcatagttctaggtgctttataaagattcttttaagtctacctgataatcagatattaaaacttttgagatattatcaataaagatattatcaattttaaggtaaacaaactaagctgaaaagtttaggtgatttttctaagatcaaaaagattgtaagtggtagaggtgggtcttggaaccaggagtccactgggcggcattacaccaagaagttcaaaggactctgggaaacaacaaatgtctcatctctttgatgtctgtccagcatacttctgtggtgtccaggatagccacgcaatttgatttatgaacatccttagatcttgaccctttcttagaaacttggggagcaggaagagctttttaaaaatccttccaaatacagttgatctatgatggttaactttgattctatcctttgtgtcttatgacagctgccagtcattgttggcatgaaatggattcctactttatctctacgacttagaagctttatatgtacactacccttaaaagaaaaaaaaaaatctccaaaacctacctactcagcattctttttttcaagtacatatgtctcagtccattttggtgtttctataaaggaataactgaggttgagtaatttataaatagaagaggtttatttggctcatgattttgtgggctgtacaagagcatggcatcagcattggcttccgttgaggtctcaggaagcttccgatcatgatggaaggggaagggaaaccagtgtgtgcagagatcacgggtaagaagaaggaagcaagagaaagaagcaaggtgcttggccaggcgtggtggctcatgcctgtaatcctggcactttgggaggctgaggtgggtggatcacgaggtcaggagtttgaggccagcctggccaatatggtgaaaccccatctttactaaaaataagccgggcatggtagcatgtgcctgtagtcccagctacttgggaggctgaggcagaagaatcacttggacccgggaagtggaggttgcagtgagccaagatcgtgccactgtactccagcctgggtgacagagtgagactccatctcagaaataaataaataaataaataaataaataaataaataaataaatgcagaagaagcaaggtgccagtctttttttttttttttttttttttttttttttttttttttgagacgggagtctcgctctgtcgcccaggctggagtgcagtggcggcgcaatctcggctcactgcaagctccgcctcccaggttcaagccattctcctgcctcagcctcccgagtagctgggactgcaagggcccgaggtgccaggcttatttaaatgaccagcccgtagggggactcttgtgggaactaacagcaagaactcactcattactgtgaggacagcaccaaaacattcaagagggatccaccttcatgacccacacacctctcattaggctcccctcccactaggctcccctcccatactgaggatcacatttgaacatgaggtttggagggtcagctgtccaaactagagcagcattccaaaaggactctgtgcatatatgagttgaaacatgctgccctgtcctcagaatgtaattaagaccccctgtttccattcctctctactatctgcttccccctttgtaattgctgaagacctttatgcctggatttttcataaattcatgtttctctcatttctaatataataataggtcaaacatcctttgaaattataagcaaattaaaatttaaattgacgtgatttatatgaaaggatcgccaggcagatatatgaaaagactacagtggaaagtgactctgggttcctggattagagagatgtataattttatgactgctaatcagcttcgtcaacgtatgttaatttactgcttgggtcatccgggatctcttcccctcccagacttagcatccccggctgacttttgagtgagttcaaatttccttgggaccattgattactgcaattactgggagaatgagaaaagattttggagagctaagtcaagccctgtacgctctcagttggcttgtaagtcaggtgaccaaatgcattgctaacagtatttgcagaacaacaagaaaaaaaaaaaagcctccttgttgatatttgtggtgtttcatttttagctaatgtaagtctagaaataaaatggtctgctgagatctttactgatatgtatttcataacaaccactgagcaattcacagttgaattgatgagctatcagggttatgtgtttctgtaaaacagagacatctaccttggaaaagctttctccagggaaacagacctatttgagctaaagtaaaacaagattaaagtgtgattaaagtgctgcaaatacgacctacgtggaaaggttggaagaactgggattatttaacctgggacagaaaagctgcaaagagatttcaggaaaacttcaagtgtccaaaaccctgactccactcagtgctttccttggcctccatagattatagagcagcaagcatgatcttaagctgtattattagggttttaggtcagtcaatggccttcaagccccagctgctgcacgttaaaatcacttagcagccatttaaaacatgctaatgcctgggttctactctagactgatgaatatccagaggtgacgaccaagcattagtatttcttaaaagctctgctggtgattttaatatgtaaccagagctatgagttactgggttaactagaggaaaacagttcctgaccacacatgcctcagaaacatgaaagcatctaccacatttttaaaatctgagtgcatcatctttgagatggattgcttgtggttgtaccagccgacttagtgtccctttttctggattggccattctttctgctaagtggccagggagcatgagatcacagatagtatctcagtgtaggttctagaaagatatttgttgaatgaatgagtgaacaaataaatgtcaagagaactcctaggacattagctgacagtttgtaatactagttgtcagaggtgggtttcgagaatggcttcccaaaagcaaatgatggttaaagtaagaaagtgtcaccagattttatgattcaaaaataacagctaaacttcaagactttcataacaaaacatggtaaagatagcagtcagaattcaaaagtgaacaaggaaggcagtaatgtagaagtgttggtagtgtatgttgatcactcctttatgaagtttagaagaaaaggaagggtcaggcgcagtggctgattcctgtaatcccagcactttgggaggccgaagtgggcagatcacttaaggtcaggagttcagggccagcctggccaacatggtgaaaaccccatctctactaaaaacacaaaaattagccaggtgtgtggcacatgtctgtaataccagctactcaggaggctgagacagaagaatagcttgaacccaggtggcagaggttgcagtgagccaagccactgcactctagcctggctgacagagcgagactccatctcaaaaaaaaaaaaaaaaaaaaaaagaataagaagaagaaaaggaaggaagaagagacattaaggtatatctggaagtgaaagaattctctgtgcagtttgaaaatagagaaatggggtgggtggggagagtaagatgctgaacagggtagcatagctgagggaggaagactgcagaggggacaaggttgagaacactgcagaggacttctcccataattcagcaataattcgggtagtgtgcctttggtctagttagcttctgttgtgtaagaaaccatcctgatttgtggatggggaatttgggcagaactcagcttggtgatcctcccactccatgtggtctcagttaggcctagcaatgacatttgcctggtgactgggctggtctaggggatccaagacagcttcgctctcacgccttgctgctgtggaaggccatgcccacatgggctccttcttctctgtggtgtctcaagatgtttctacacgatctttccagtaggaatgctgggccttcagtggcagcatcaagctccaagagacgaaggtgggggctctcggtcctcccaggctgggcctggtgctgacatgtgatcccttctgctgcactctgttagtatagcaaggcaccaagcccagcccagactcagagaaaggggaaatgtaatccacctctcagcgacaggactatcaaacaactcatagtcatctttaatccaccagggtcatgctctagaaaggataagcacagaagaacagttttgaagtagaaaatagtaaaagtgactagccatagccgctgattaaccaattaatcttgaactgttttctcctctgtaaagtgtggttaatagtaagacctgcctgagtctgagactgggttttccaggagacagaatctgagacgtaatttagcaaataagttgctgattggggagtgcccttgaaatcagcacctgtggaaaggtggaagaggaagcaggaatgaacagagggacaattcagactatgacactgatcagtggcggccgggaccagccccacagcaggggctggagtgaggatgacctaactctttgggcccttggtttctctgagcctgggttgccttagctgtgaaaggggtcaatagttcttgcctaatggcactgtcatgaggattgagtgagagcacacatgcacctgcacacaggaaacctggtacaggggatgcctgataaatgtttaaggtgatgggatgtatcctaagtaatttctgaatggagtaagggggcagtaattactcatcagagtaattctcagggggcgggtattgccagacctctacgcttaatcttgaatgtggccacctggggaagggacatggccccagagaggtctctctccagcaggattgatccccaaaagggctgagagccataaccacctgtctgccaagggcactctgggcagctgagcaacaatctctctctgaagtgggacgtgggtgctgaccccggtgcccatcacagggcattggcaatgcttataatgcgccggaaatcgcatcctgtacattggaagctctgtttgaatgtcagctgctgttgaccagtggttgccataaagggtttgcaggcgagacaagggaagtggtttgctgaatgatgatgtggagaaggaccagaagatagctagtgcttctgtgcaggggccacaccagcatttagcacagtcggggtgggccaggagtcaaaggtagccagaaggagcctagctaatggactgggcaaatttggaaaattgctaatacattcacagactggtgtcagtaaggtggcgctctcttcactgtgtgaatgaatgaaaaggtcatccgactacactgctttgctttcccgtgattattcagcatcactggggcatgaggtaatgggaagataatgggctctgggttcagatcccagctttgctgtttcctagatgtatgaactttggcaaggtaattaatctctctgatcttcagctccctcattttaaaatggagatcacaataacaaacttgtagggttacttaacagtaatgtgtgtgtgtgtgtgcatgtatatatacatacactttgcctggaaagaaatgcctgagatcaacaagtaaacgtttctatgctacgtggagttacttgcaaactgtctcatggctccattcagaaattacctaggctgcatcccacggtgttgagattcaacgtaaacatttatcaagcatccattgtaccaggctccctgttgtacaggtgcaggtgtgctctggctcaatcctcacaacagtgccattaggcaagaactattgacccatttcacagtgaaggcaactgagactcagagaagccaagagcccaaggtgtgagttagcacataaatgacacagtcagaatatgagcccatgtctttggactcccagtctgacccccactttactgcagcgcagtagaaaagacagtcaccctaaattgaggcacaggttaagtatttctctgcaccccagctggggatggctgattgggcaggtgtgggtccacagtggtactcacagtaggacaggtcaggtgtgtgtttcaggtgggctaatcaccatagatgggagcgtgcatctccaatgtccgcttggattgtcagctttctttggaataattaagagaaggtaaaggaagaggaaaaggagtaaagaaatcatctttgtacattttaatctgagctgttttcgagcagtgtgataaggtaggttgtcgaaatgtcagcttctccttatctctaattgacttaagtagaggcagctctaatccttgtgtgcacaggagcctggaatggagagatgaggccaattgattcctactttttaattaacaggtgagctgcttaaaaacaatagtatattgggggcaggttgggaacaggaaggaatgtgagggagggtcatctccaccacagtggcatttagagaaatattaacaagtgtcagcatttgatttgaatcaggggctggagcagagggaaaagttatgtcttatgcatgggtgtggtcacaaaagactgctgccaaagtgacaaaaaatatttatacttctctccatacacaaatggaaagacccttcgatttttgaagtatcatgagggagacctcgaggtattcccttgtgcaaattgctcctcatactgtccccccatgttgcagccaggagcagtttagttggtgatttcagtcctatctagtccgagcaatgacaagtcagcctggcaacctcttacaagtctcacccagccagtgcatcaaatctggaggaactttgcccacactgtgtctgatgtacctatgtgtaacccccctggtctcccagagctgactagctattctcgtcgtatgtgctggttctaaatggctaaggctcctgtcctcattcccttgggtctccttattctgaacccaacctgtttggctgatgccctcattccctacaaaacagtttttattcccccacccctgggggctggattttatattctggacccttctccccttacttcatctctagttctataaccaacagcttggtgacatctatgatcacagttctcttctgcattcactgcacatgaccaccacctggatattcttatcaccatgcctcttccatttcccaaattagtttcctggcatactcttacctggatggattacactgagatttgctctatttcctggatataggccattgaactctgttctgccttagttggggatagagaaggaggaaaaagcctcattattgaatttgcttcccaagacccatccttggaaaaagccatcttatgtaatttctttctttcctgctatttctaacatcccagagttcttcagagccaagcaaccatggatcatgatgcttacaacgttatgggagcatgcactcaaatacacgggacttttaactagtgttcttagtatattaatagatgagaggcaggggtgtggactagacggtctctgaatattttcctttccaggatttaacaatctgactctttggtagatttggaaagcgataaatcaaataactattgaggatgttcagcccattgatcatgtactagttgagtatccctaacctaaaaatctgaaatctgaaatgttccaaaatctgaaatgttttgagcatcaacagaaggctcaaaggaaatgctcattgtgacccttcaagttttcagatgagaaatgctcaactggtataatgcaaatgttccaaatttttttaaaaaatctaaaacctggaagacttctggtcccaaggattgcagataaggtgtaactttcacctctctatctttatgcttgttttcattttgtctgtttttatttaacttcttaaaatcttccccaaagttctgttatcagggagacatcttggtctgggaatatgccttccctcttcaatagaattcatgtaagtttcctgaggattggcactgtgtttgatccattgagatagctccgtaataaaaataactggcatttattaagcacttactttgtgtctgaaattgtgctgtgccctttacatgtttagttcccttaatgctcacatctgttctatgagagaggtgttcttcttatctgcattttataattaaggaaatagaagctaggggatgttaagaaactttcacaggttcacacagctactcagtgccacagatgcttcaccaatatgcaatacagtcttcctgcagctatcccggtgcccatgatgacttcttattctgtgtttgttgaatgaatgttgtgttaaggcatggattctgtttccagttctgctgctaactggagtaatctcctcgaaataattgagctcattctttttatctaccgcctcccacagatcccagtacagagtaagtattcagtaagtatttaataaatgcatgctaaataaatgggtgaatgagtgcttgatcccagaattctcttctacatctaacagcctatgactgtagcttatatggatctcctcttccctgacctctcatagcacacttgatgtttagacatttgatttgatttgatttcatcttttgttggttctaactgtttagtgtgtgtgttttgtatttccgaatagattacattttatttccttggtattccccacagtgcctagcccagtgcctagatgtcatgagtgctcagtaaatatatattgcaatgggattgagtatcgcttcagcacacttcaagccagaagaaacactgaaattagtcacctcctgggctattgttttcctctttagagaagctgtcatgcagtttctgctaaacagatgttttggacaggtcagggagcagaatccaggctgcggctaatggcacaatttgacatcctgccacagtttacccacccatctgcccataagggctggtccccagatagaaagggtatttacgaagctcttagtaaatccagaggacaatcatgtaaaagatagactcttagataattgataaaatttctctgagtgagtggaacccttaggttgttgtaaacatgtgtacatgcttgcacgtgcacacacaagactcaactttgaaccttgagggaaaaattagactctcaaccttgctcctttctgatgaatgggaacaaaaccaattctcagagggtaaataggatggggaaatgcagacaggctcatcagtgcccaaggaaaccaagaagggccaccggagtgtcaaggctctccagggaaaatgtgggtttctacagcatgggagactccagagactttaacacgcaccaactgaaatcaaggctgctcggtgcatgtgttggtttcatggcatggatatttatacaagaaagataaaccctctaggaagtgattaagagaaaaatcaaaagaaagactgaaaagcctgggcctggagtgacgcccacctacccttagatacctcccctgtacctaatggacttgatattctttgcaaataggcataatcactactgttttgcaatttcgtgaataatctacccttggagggaatgaagtttcttatcctattctgccagcctcctcagccaccctccctctcccccagcctataatctaaggactccacctctccccctcacacactattacagagtttgtttgaggagtgtacaagtgccttctagaaagaggcagactgggtattcgtttactctagtgctatcatccctccccattggatgcatctgaggaaggtgaattacttggggctgcctctatatcttaaaatccttccacacgtcagatagaaaatcactttgcaattatatttttaccaggcactttaaggcaaggacagtgtccccttcatctgagaccctctggtgcctggcacagggcatggtgcttagtaggtatttaataaatacttgctgagtgcatgaatgaaagaaattctaggaaggtttgagatatacctagactagtgtggtggatgttttatatcctttttaaatctactttctaccctatgagaatgttgagcatatgagaattcaagggcaaaaagaaaaaagaatgaatttactgtgaaagtcatctagtaaagttgagtgcctttctcaaaaaaaaaaaaaaaaaagactgaccagttcttttactgggggacttgaaagcttacaaaagagaaaggagggtgggaaaaaggagggaagggaaaacactttccccactatagggagggctggaactgtgaacaaaagccctatgattcacccaagaatagaagcttaaaggactccaactacatgccaaggcgccagaggtcctgccagcctcagctcatgtggggcatttgccctttgatgcagccaagaaagggatttcagcagcaaatggtgaccttagaacagctgtgctggagggccaacgacccccttaacctcaccctgaccctaactccctcccctcctaaatgctaaagggagcaaatgaaagagttaatgattagactagaaaaatcaagactgtgttgtccatagaattacttatcagaaaaaaatacggaggcaattaaggaagaaatgtaaactataccttgctagaggtgggagagaagggagaacagtagtgggaggtagggatgaccagtgagcacagagatgatggaggcttctgcaatagatggctcagcacacactcagtgcctgccacgagcaacggcttctctggccaccatttaaagggaacctgttatttccacttcatagatgagaaagctgaggctttggcaaagccgagtgacaagaccaaggctccactgccagaccagagccagaatttttaattcttttagacaggatctcactttgttgccaaggctagatgcaatggtgtgattatggctcactgcagccttgatctcctgagctcaagtgatcctcctacctcagcctcctgagaaatagctgggactataggtgcatgccaccatgctctgctaattttttttgggggggaggtgggggtaaagatagggtttcaccttgttgcccaggtggatctcaaacttctggactcaagtgatcctcctgcctcagactcctgaagtgccgggattacaggcatgaactgctgtgctcttcccagaatcaggatttaatgctaagtgtgtcagatgtcattgcaaagtgtagtgaagtggaacttaaggagggaaggaaacactttcttttatctttcttgatgtttctctttcactattgcaattgtaacagctttctctgagctgttaagactgcctgttctcttggcatagaactaaaataaaactaaacataagccaacctgaataattaaatatttatcgaatttctactatgagttaggagtgttactctgagctggggatacaaagtgagtaaaacaccgaggtagagggttttcataagatggaggtgaaatgctttaagaaagcaagtatgggaacattaagtcttctgataggaggggaattaactgaagcttctgcaataagctgttattttggagggcaagatagggaacggcatttcagacagaaggaaccgcatgcacagaagtgtggagtctgacagctcctgcatttcaagtgcagggattcctccaggctgtttgctggggagaaaggaaaggtcatagtcagcctgcaagatctgctgccttcatgtatgtgtgttgcttggtttttggagtagtggtgtttgtggtgattttcatttattgtagtaaaatatacataacatcaaatttaccactttaaccattttaaacgtaaaatttactggcattaactacgttcacagtgttgcacaactattacaaccatctccagaattttttttaaatcatcccaaacagaaaatacatccccattaaacaagaactccccattctccaccccactcctccagctcctggtaactttctgtttctctgaatttgcctattctaggcattttatggaagtgaaatcattcattcgtcatttttagctggcttgtttcatttagcgtaaggttttcaagatgtatctatgttgtagcgggtatcggaactctactcctttttgtggctgaaaactcctccagtgtatgcatatatcacattgtgatcacccactcctctgtcatagacactgggttgtttccactttggggctactgtgaataatgctgctatgagcactggtctacatgtatctgttcaagtccctgctttctattcctttaggtgtatacccagaagtggaagagcagggtcaaatggtaacttgacgtttcatttatttgaggaactgctaagctgtcttccacagcaactgcaccattgtacattctcaccaacagtgtacaagggttctggtttctcgacatcctcagtagcactgactgttttctatttttctttttacataacacattctaatgggtgtgaagcactatcttattgtggttttgatttgcatttctctaatgatcagtgatgctgaatgttattttcatgtgtttatggcctggtatgtatcttttttggagaaacgtctattcaagtcctttcctcttttttaagttgagtttttcattgttgttttgttgttgaatatataagttgtgactaccaggagatctagtattggaacaaaatgtcaccactaaaggtgcaggcttatttttgtttaagtttaataaaacacagctctgccttgctgagatgtgagactgaaaaaaatatttaaataatttttattgttgttgttcttgttcttgttcttatacattttcctgaataagtgactcttctagactcccccatggccaaaagtaataaaactcatagcagaagtgggaatggcaagctaaataacaacccaggaaaaccactgcaaaatcgtctgcagatgtaaatcatactttgtgaaagccattggattagaaacacattatccttgtctgattcgctcacacccacatgttcctagtaagcgtcgagcgtgatttacaccctgacatttaaggaactgggaaagggtgatgctgcgcggccttgataaatgcctttctctgtgtctgttacaccagcccaggagagaatggggtagacgtctccatcactgaaatggggggcctgggccttctgcttaaatggcttctctgcccagccctgactcaatcaggaaaagcaaagtagctgcttggcccaatgactatagcccaggattggaagatcagaatttctggcttcaaatcctcacctgcccgtgtcattgaggtgggcttagagcatcccttctgtgaaatgggggcaggagtcgtggctacaggattgttttatgcttcctgtgaaataaggcaggttctacatgcatagtcaatctgccaggaaatacagttggagagatagatgctgcaggaggaaagaaagctcacaacaaggggagaagaggctacaagcagccacgcagacattgaaaaacaaaccgcaggttttgtccagcaacaaaagccaatgatatctaagaactagaagtgtatttgctgtgttttcccatagatttgaagccccctgtcccacgacacagtcttccccacccagggagggatccagggacgcgtgtatttctccgttcacctctcattccttactgggccttggcatttccaggcagtgctgctccataaacactcatcctaatggctcctctggggtctggaggggggcggttagctgcattcgtgaattcagcattcagtccctcatatccttcaattcaagtgaacagctggcagtagatagtgatagcaaggaaagaagccatcactttgttggatgtttccctgaataataagtgaactgcttacgacatttctgagagcatccaaacagccatcacccagccacggccacgaccaggctactcagcagggggagcagcctctctagagtttgaaacatgggtgaagtggaagctctcctgatgctcatggatatgaacactaagacatcagaccagacacacatgcacacatgcatgcacacacatgcacacacacacacgcaccccacacactttagaattaagttttagttattagcttgtgaagcatccctgaatcttggtcccctcctctttaagatgggggtaacaccttaccaacgatctcctggtaacattaaatagggcaggatgtgagacagtctctggtacatcataggttttcaaaaatgtttagtcctttagctcctcacccaacataaaagaaaatcttgcgcttgttcctttgcccagataacaaaccttattctgatattttggggacagcacaggactggaagaaaaaaagaaacttttctaaccgtcacattgatttcccttttgggcacacagagccattactgaaaagtcacttgctgaagtggttgtactgtggcctcttcaggaagggggatgtgctaaggccaagccaggctgctggagtgcctggagcacaaagcccttctgagcatgctgagcccttgatgactggcgtggactcggcccccactccctgcacaatcatgcagcacaaatccctgtattttcaatggaaggagccgctccagtggcgctgaagaaagatggaaaaaatccttttcttgcaggcaggtttgctctgcaaccaccactgaaggtgttttaaaattcaccttgagtttgcctctcaggtccttgatgctgctcgcggagggaaggtagacgaaggaggctcgttcgtctgcgtgccattgtgtctagggtggtcccggggacaggtgttagctctctgggacagccaaaggacgatgggccctcagcagaaggaggacttaattaatcggtgcattgattgcctactgtgagtcaggtgctgtgctagtggaggcaggggaacaaggcactatcttgtcttccggcatcttaaattctagccaagggtgtaaacagttatatggcaataaaagaaataaataacaactcaaatcaataatatgggaaatgtcacactatactctggtccatgattgaaacggagaggacattaggggctatgggaagagatcagttattagctgcttcctgcaggcctctgaccataaaacaagcaaatatttctaaggacccctatgctcatcgcctcgtctgatgctattttgaaattcttgtcagtctgttaactgctatacaaatggcataaaggttcttatgagaatccctgtcccctcccattccaggtgcacaggcttcacacttaagtcctcaaaggaaagaaggcaaacattgcaattaccccaagaggagcttagcatgccacatgctctgtgtgtatctcccttggaacagttatcacagagccttgattctcacctgcctccctcatgggaccacagactattcaaagaaagggcctggtcgaatctgcttctgtagcttctccttggccaccgcttgggataatgactgacacatagaaaccacgccgaaaacatggttgaacgagtgcttatagaatgctactgacttactgtgttgccactggcatataggtctgatatccgtggaagaactgctaagagtggacaatgttttgccagaaagaatgaatgcttccttgtcaaaaagccagtattgtaacagaggtgtgggttgggtggttgggtagtagcactcaccttatttccacttttcctcaatagaataacttgcggggtggggtctgtgtttaaccgtatcttccctaaggcagttccaataggcaaatgggtacttgcaccccaacagccataggaggagggttcttgttcttgttcaggttgggcagaagagatgggcaggggtacaaggtggtaaagtgcaaggtacttgtacccctaaaatttcccaagcctgctatgtgaatgctgtccagccctgatggcaaatcagaaaagtggatgcccaggagagagcaaaccaatggcacatgagcagacagcaccaacaatgagcgattatttgtggagcacgcattacatttactcagcatcaccctggttactgggggacatgcacatagagtatggagcccacaggtagtaagtgctttattagagtttgttaagtaaacatgtaattacatagaagataaactaaagtttttattatttttatatgaaagttatcaaacatacagaaaagatgaaagatttttacagttaagacccataaacccatcactagattctacaattaacacttaatttaattctctttatcagaaatttacctgctactcatccatcaatctgacacttttgattgtataaaggtagattctacttgaggaaacatgatgtatacgcatgaaacaattactcagtattttctaggacaacgctaaatagtgagacagaggcacacgtctggatggagttaagaaggtgatcatccgtgaggaataatatgttcagagactgtgtcatggagggaagtgggcctggaagaatgtacaagatttgcgtaggaaaagggagaaagggtggtctttaggtgtgcggagtcatataaataatgcccggggggacccagcccagaggaaaggtgagtggcatccctctgcccagtgttacacctggcttccagccagcctgaggctgttctggtgcccgtgaactcagaccaccctcatcatcctaaacatcaccgacctgggggatgaaagctcagtatgaatacctccgaggcactgcagaccttgagggagctgggtgcctctcttgctgagtgactcatagtaggcattcaagagaaaggtccacagggatgagcttcttcatctagagtgaagtttaaaaaaaaaaaaaaaacaattgagttggatatgtgtgaaacatgggaaattgaaaaacaaaaaggaaatgagtgaatttgaggccccatcttgacaacccctgataaagaccagagagcttgtctgcctgtctcccaagcaggggcagtaacatagacctgactgaaagcaacacgtgagcctgaggaagagctgccaccttccggtggggcacccacaatagacagctgcgcagggtataagcaacttgtgcgtccggggctgacagagccgctaaacaaccacacctcctcccaggtgccatcttgggaagaggcttctgaagatcagcttcaaaaggctcttattacttaaggtccttcctgggacatttgctggtaatgggagtcagatgcaatcctcgcttgtgcttaaaaggcagacaagatggtgcagagcaattactgagtatgtctgcacaattttgaaaaccagctacctgtcccttggcaggagaggctttggctgcctgcagctggaatgctctaccttgcctttgtttttctcttttcttccgctgtctcccggcactgccctcccaattcacctgcattgtttctacctccttccagtcactgcactaagcatggattccatctgttcggggctccctggagaaggaacacacaccttcactctgcagtagtcacccagtgctgcgctggtcagcacacaagcaggggaccctgtactgacagaacaaaggacagctgtcctgtgagtggtccagccatgctcgggccgggaggaattcatgcagcacacaagagggataagcacattcattttgtgacgcagcctctgtgtactttgtcagcaaaatggagaacactcactattttctctggcttttaggatttccatatttattgcttgtttgctaccactggggagaagggaagaggagaaaacaacaactttcttcatttgaaattttaaaacatgaacatgtgaggtttaccctccctcccctgttcccctgcaattccagcaatgcacaggactgtagaatgttacagctggaagcccttgagaaatctaaacaatagtgcctcattttacacgcgagaaaatcacggacaggaggtgaaggggcatggtcaaagtcacatacctagttagtggcagccctgagactagcattggtgtctgcagaatcttatttttcttattgctgtgctatgtgggttctgtttctattcaagtcaagaatcctaccacgtgtaggagatcctactctgtatatggtactgtgcaagacgctatccactacctgctttaatcctgccagtgccccgctggggtaggatttacttccatcggttcagttgttatagttagtgcctgatcacggggctggaggagctctggagcagagctcaggcaaaggctgttggttctctctggactgtcctgtcctgtaaaggtggacatacaggataaacacgaagcagtaaggagcaaagtgcctggctggcaggaacacactagttgtttgttaaagggcaaggtgggaatgatgttggtcaatgggtacaaaatttcagctagagggaataagtttttgagctctattgtacagcatggggactacagttaataatgtgttgcacatttcaaaattgctaagagagtaaatttcaaatgttctcaccataaaaataagtatgtgaagggattgggcatgttaacttagcttttttttttttttttttttaatttttttgagaaaaggtcttgctctgtttcccaggctggagtgcagtgatgtaatcacagctcaccgcagtctctacctcccagtatcaagcaatcctcccacctcagcctccttagtagctgggacttcaagcgcatgccaccatacccagctaatttttgtttgtttgtttgtttttgcagagatgacgttctacaatgttgctcaggttggtcttgcactcctgggctcaagcaatcctcctgcctcagcttcccaaagtggtaggattacaggcataagccaaaaagccaatccatcaaggagccaggaaggctttgcagaagttccttctggaagaatttcagccaatagccaatattgaaggaattagagggaaggtatttcaggcagaatggagaggaagaatcaggatgtgttcagggaagagcatgtaggcgaatgtgaatggggatgaacgcttgtgcaccaatagagaaaagtggggctggaaaggggttcagtaatttatgggatgatattaattggggcccatcatgtttggggcactcttgtaggcctgtgacttagcagacaaggatgggaagcacctactcacacacagatagtgccgtgatggccagggcctgagagcctaattccatgggaccatttgaggtaagacctgaatgacaagaagaagtgggctctgagaataatcagggccagagagctctccaggcaaagaaaaggaaagcaaagggctttgaggcaagaactagagaccctgtggaatgaatagaggtggacttaccagcaggagaggagctggggcatgggagtggaggtgagaccaggcagagcctgcagtgcactgcaggaggttgaactctatctgagctactaggagaatgagaggccctatgttatctggcctctgcctctatcctggacctcatctccatgggaaaaactcatctctgtttgtgcccaagactcttccagttttagcactgaaagtctcaaatccaaggaacacacgaagttccaggcaggcgggcagttggtcaccttagctcccacctcatccttgctcactacggtcctgtcacaacaatgtgggaacatgctgtggagtcccttaaaaagctctggctgattcattagaaaatgcatagcaactcaacatttctgaaaacaggactaacataattaaagctatttaagcttgttttttttttttttttttttttttttttgagacggagtctccctctgttgcccaggaaggagtgcagtggcataatcttggctcactgcaacatccgcctcctcagttcaactgattctcctgcctcaacctcccaagtagctgggactacaggcgcatgccaccatggccagctagttgttttgtattcttagtagagatggggtttcaccgtatcagccaggctggtctcaaactcctgacctcatgattcatctgcctcggcctcctaaagtattgggattacaggtgtgagccaccatggccagccagctatttaagcattttttaaagatactgacgacctccaaggccattcaacttacataaaaatgcctttctgtggaaatttgggcattcctttggctatggagagggtagtaggtcaattggcatggctgaatataaaaaagatcttctccgtccagatgtttctgttcacatcctcttgtgcagcatagtttggaatatttcatcttcattcttcaagacttaaaggtgtatcactacagtaaacagaacttaaaggaacaggcctttgcatggcagcccagctgaatctgcacaaggcccttatctaaagccagttgtgagagaaatacagtagcctctgtgctcattacctctagaattgcattttctagcttctcattaggaagcggtgacatcagaataggaccctgcccctttaagagtctttcccaagataatgggattcatgatctcacaatcacataaatcactgccagcccccttgagtcaattcatacttctgtagttcgttagtggcacgagaggaaattgcatttattataattgcctctaattgcaccagattagtgattacaattattgatggcagctgattattcattaggcatcaaatcaatccccgtgcttcttcattactcgaaacagtaactctgatgagaggtctaaaggaggccatgtccaccctttccactaaatggcaggctgcctccccgtcctgcctcgaaacaaacacctgaaaataatttaggacttaaagtgacagagaaccatccctcgccttccgccatgtaatgcctcatcccgaacccagcactaactgatgaaattacggaggctgttaaacatcaccaaagactatttggaggtcccagaacgctccagaattgctagcttttcctggatgcccttcttggttgcaaaatgaaaatttcagagtttcctgggttacttctggaatatatgttacctacaatacataaagagagtagaccttacagccacacaggccagacttaaatgagctatgtaaacctagtcgattttgtgagctatgtaaagtcagtcaattttgtgagctatgtaaagccagtcaattcgtgtgtgaatttttgggagctatgtaaagccagtcaattcacgtgtcctgtctgaactgtagaatagttgctagattgtgtataaacaagcaatgagatctctgcttctcttgttcaccatcagagtctatcatctaaaatagggcctgtagagaaaagaatacaatagccatctaaggagttaaatacctacctgcaggggttgtgatgatggctgaattagataacatatttaagactttgtgttgtaccaggtaaaaactagttgctcaattagcgtcatttcctctctcccctacttcctccatgctataacatctaaatttatatcctttatccagtgtgtctctttatacacaggctcaatgttaactaaatttatctttttggtgtgttcttcttggtgaacatcagtatatgtgtaatagaagtgcagcttccagaagactgttgcctcatttactggtagctacagcatgccaggcaccagatctagagggttagagagatcaacagagcataagtattgaccttgaacagctgacaactaaatgggaatgattgtccattctatttccatgtgttgtttgcattaaaggaatatccaagttctaatgagcccacaggggatggagagacccggcacagctcggaaggtcaagaaggcctcagagttagcttttgagatgagccttgaagctgcataaatttttccaagtgcctaacaggtcactagccttccaacacaccatgtagcacctgaagagacaagaagagagaaatgagcatgtcttcagaactgcactgtgaacttctaggtgcttgatacatgaagacagtgacaatgttaagtgccattttccagacgctcccatgggtaaaacttctgtaactaagcaatcttttcttctcttagctgctgacatctcagaaatgtggcgacatcttgaggttttcttctatgaacttctgtgaaaccttatgctgcctttggtgacacagaaccctaacctatcctttcctcaaattcccagctgacccaaatgtaccccctattttagcacccacatttatcagctccctctacttctcacaatcccccctacttccactagtgagttagttcaagagcctaagtgtctccaggtagcagagacattcagagcacaccattgtctatatcaatgcaggatttcctgaaaaccagggagggagggaaggaagaaagagcctctgggtgaggaggtgtgcagcctggctctttgtcaagtctttgtcccacgtgagagtcggtgctaatttccctggttgcttaggcttgagccctgtagtatgtctgacctacacccagatcctctagggatgtaagcacagtgattcccaaaacaatccaaaatacgaggcccatagcctggagaacatgtccctggtgccccttcctctggacgccttccttgcccacatggttgccagttacgctgcctcccagggagctgaggatgaacacgtgacttctcttagcagagtgaacgtatctcctaccttaagtctcttgtgtgtcctacttgtgagccagttgaaacgctgccattttctccagagactcctctctacatcaagaccatgtaaccatgcaggaagaaatcaatcttcttttctagctaacatgttccattacctcccctgttttcaaaacttcccataaagtggcagtctcctctctgaaggctactcttttagacaggaaatacgcagggatagcatcacttccagagaaacaagagaacagactgatagatcagaacaccagataatgtcttccctttcttggcaacggtacatatccctaacctctttcccaagacccacagaagagcagggtctctcctgaagggcaacaggacactgatccactgtcttgtaaaggaagttgtgttcagtgattttctgattagggagaaagttgctacaaccagcaccagaggaaagctgtctggtgatcaaagaccttgggggtttgcctgggctacttttggaggctgcccaaagcctgctagcagctcccacatgagctggggagaggctctgcttccctctactccagcacagcttcccctaattctgaactttcagagaagcacaggttcgagcgctctcccttgcccagtccttcatcagctggtgcccgtagccctgcatcatcctggtaacagttggtaaacgagtcccagtctagccgcttatgcaggatggttgtgcagtaagaaccttcatccttatggcaggcacattaatgccaagtttgctcattctaattaataacagttagtaaacaccaaagagagctaatgatgattacaggccacagctcctgcgtgttagcaaacacaccaggcaggtggcctctcgtctcttcccaggaaagaggctaggtcctcttcttgcagagatgtcttgcctcctcaaggcccctaccaccatatttagcaaatcttgggttacttctcagcctggaaaagaccaagatgcatgcaggtcagtcccatggaatggatcatgggctgacttcaagattagaggactaaagaagcaggacctttgatcttttagggtttccagacatctctttctggcacttggaataaaacaaatttttcttatttaaaaaatattttttccaatttcaaagtaatacaatttgcttcaaaaaattaaaatactacagaagcatataagaagaaagggtgagtctcccttcgtcctctggggaagtgggattcagtgcctggttcgtttgtctacagttctcatctcccctacctcctcttctttctccagctcatatttctattcctggtacacaaagcttcccattctactaccaaattatccctgttgtgaatcctttattccccatttggctaagcctttactcatcctctatccctagatattttttttttctgactcaaggattctgcctatggtaatattttctgtgaccctgaaggcaaaatgagagttcaactccatggtggcactaggatatctcatcttggaatgttttcttctctgagttccaggggttgtggcagttaaacataattacatccacttcccgtcattcagatatgaacctaaagttggagaatgttttatttcctgctccgcagccctgggcatacaaggacctgtgaagagtggacgtgtgagtctgacagagcctcctgggggcgccgcttgctctatgttttgagccctccaggcgaatctctggtcatcgaatcagataacttgatagcagtgggtggaggtggtttgaggaataggacaggccacggtggtttcagaatcttaccaatagcttgatcattttcggaaggaccccagacccctctcaatctgtcattatttttgttgttcttgttaatcccatccttctttttacgaaaatttagcccacggggctgcaagggtaatatgtcttctatcactgtcactgcaattcaggtaatattttctttctcgctggactattaactgtatcccactggaacccattctctgagagtttaagaatgaaaagaatgtaaataaacagtgaaaatgggtatcatttctaaggatgtttataaagtgatccaagcagatactcaggtataaccagaatggcttatcttaccatctttttaaatgcatgataccttttccctctgtttctttgtctttttctttttcttttttcttgagtctgtctccttttctgtgtattagcttttcctccatttttttctccttgatgactttttttctctcagctttctcattctctttcctttccttttagtcacaataaagaattgaagggcattttcaagtttggtttggttcattaaatgcatacatccagatgtatggatttattcatccatacatctatccatccacccatttattccaccagcattcactgagcatcagtcttcttgacatcagtctctttgctaggttctcagaatagagagctgaacagttgatccctgctctcaagccatactgaatcaacaaagggagagagacatgaaatcaaagaaactattaaatccatgaaggacacaatgggagttttaagaaggtgatgagcaggtctatggggacatattagcgaaacttcctaaagcaagtgacctttgggctaaatatgaaactgagttgaaggtgtcgtcaagtagaggaggggcaggggcctggggagaagatagatttttcggcagagggacctgcagtgccttcatgcaaagaacatttgaatatccgagcattatctaacctggctgggagggttacagtgacgcttgactcagggaataactgctgactttgttcatcagaacccagctgtttatgggtagtcagcttagaaagtgggagggggacctttacatgttacctaatacactgctgtggaatttgaatttttatactgtgagcatcatttacttttatcgaaagaaacactaataatttatagcctcatgcaccatgttccagtgtcaggtcttttccttttagcaagcagagagataggaaaggtttgaagcggggcaattgcatgcttcaagttttgtgactgaagctttgtttcctatcccttcgctttaaaataggttgagtataagctttctgtatgcatctgtaacaaactaaacccggttcttctttgcctcaaaataaccctggattgattttatctttctcttggtccgtgatccttgatacaaacaaggttcccacggccccgttagccattccactctatccctggccactgtcctgtttccctggcatcccatcgcaagagacctgcttttactttcacattctgcacagcagggatttctgcaaaaactgaaaaattgcctatcaatccctggtcaaagtcaactatgtcatgttctgggactcaggaggacagcctgtgcttaccttcctgcactccactggtgcaccaagctgtcctgctcctctccttcagagcttttccatttgacttcaccttgttcccgagcagtgagagagacccagcagcctctgcagctgcctggaccactgggggaatgtaaatggagcaaccacataaacgaggagtgacaagcaccacgctgagctctctgcaaagctgcccagtgaccctaggagggaatgagaaataaattagccttggggtttgtgaggaaagcaggaggcccggaaaactcttcctctttctttccattgcttctcaaactgtaccttttgtgtccttctaaatccatctaccaggcctcaggagcccgcaggtgttcccccaggctaggctgtcttttccttgtccctaaaccccctgagttccttccctccctttccatcatgcctctgagttactgttctatggtgccctcctccaacctcctcttccaagaagccctctgtggtgaccagagcaaggtcagagacagaaccagatccatgcacatatgtgactttccacaggtcagaattttattgatgttatttcagccatgacctacatggagtttccaaggtggtaattattcttactatgtctcattcactgggtagtcagaggcgtgagcacacaggccctagctgacccacaagtcagtgaatgttgcaaactatatatagtaggatacttaatcattatataaatgttatagattaacatttccacatcaaacaaagtaacatttaacaaaaagagaaaagggggtaggaaaaaggggttaatgagccaatcccaggagagcgccttggacagagagagaatgctggcctgatccagacgatcttcaacgtcttgcacgggaagagactttgaggtgggcagagccttcggtggcagatgccaggcgctaaccgtgggtgacagtgggatggcgttcagtgaaatggttttgtggacggtgaagtcctgctcttcttagagtccttgtcctctctggtaagaggtgatgtaaagtgtgtgtctggttatgcccttgtcaggttgaggtagtttctgttgattaggtgaatgtctggtcctgttggtatgaagccttttgagatgtaagatggagttcttttctaagatggagtcacttacgtcaagagtgactatactatacaccctctcaaagagttcgcttttagttctctcctagtcccctcctagtccccgcaactccaacagacttggatcctgcacatcaatcttatctccctttttgaaaatccttgaaggggagccaggattgataaatctttggcatctctcaaacctcatagcacagtgctaggcagtaggtggctgattagccaatgcctaggaggcgtccgaataagattgcaagcttgttttcaatcataccaagaagagcaggaacttgcaaggagacagaggagctcaaactcatcatctaccacatactaattaggtgaccttaggcaagttcctgaatttcaatgagctgctgtttccagaactgtgaaatagggataataatacttctctgggaattttagtcactgttaaattagatatgcaaagcaagtaacacagggcttagattttacttggtagttaataaatcttagtttcttttccttctttaatcttagcaagaatttttccctttggccacaagcatgttttgcctccaccaccactctccccttgtgcatttttccaagtcgatcttatccaggaaaaaaacatcccccaggcagtacatccaggtgatgcctcaaggaatgagtcaagaaaggcataaaaattattatttttttaaaaagcctatctccctagaaaggaggggtgaagcctgatcatcttttttttatattcagagttctttcttctccccagagactcagagctatataaatgtaaagttataataattatgataacatttacattaaatgtgatgctgacaaggctttatgagatacaaaagtttgctgattcccactggaatggatagagcagagtctgccttccccatcctgacttctttctattccgatccagaaagactgcctgtggggagggtgagggagaaggtgtgagactgacaagtgttgctttatttatttatgtgatatctatcaaatgcacccattgcctccaggtctcttagtatatctaaatccagcagttagcacgtacatggaatgaaaagaaacaagcccacagcaaacttccactatgaaccaaatatttaaggtcagttaccaaatacctgggaattggggacactgagacagaaaggatagcaatgaggaaactacaataataaagaactttatagccagtgacaagattacactcaaacctgggggtcctgggaggcagaattcacagcttatacatccttattttatgtagggtgtttgtgcatatgccatcagtaaaagtaggaatgaatgaatgaatgaacgaactacagacagaaaagctcctcatctccaccatttactacactttttagttccccacaagcgatatcaagaaaacatagaaacagtttagaggccggctggggaagaaagctgtatctttttctggaatatcctcagatcccattctggagtttgacagcagaagcatggaggcatagaagctgaggccactattgggaagggaccttgtgtttatctgagatggtacctgtgagaacttgactcagcatattgcaataaattgagtcagcaaaaattatgtctagggtcacaccctatatagaagaaaccccaggcacaaaattttttttaatttttgaattaaatttttttaaaaattgtaattaaaattaaaaattttttagacagaaggagagaaagagtcaaagggttgtcaactgcctacaagatgtggggcactaaactaaatctttcatacatattatcccacaatgacaccatggagtaatgattatatctttaatttctctggaaaacatcaacaacaaaacaaaacgccctgtgctccaaggaagggaactagcccgcccaagccacaaggggctgtgctttctgggacccacagctctttgccccatgtgttcaggtgtcttcgatcctcagaaagggttttcagtcagagatagattcattgtattggaggttattcaaagctattacatgcagcctttaaaagatcttcattagtggagaggctggggaaaaaataaaatattcacatgaggaaattaaattctgccccaaagatgattaacatcctaacacttagttccatctttcaagtgacaaaccacgattcgaggtgatgtctctttcccgtgcccacgtgtgcatatctgtattatgctagtacagctaagggtgtggtgacttgcatttcacgtcctgcagggcggactcaggcacaaacactcagtgtttacattgctcaggggaggcatgaggctctgggatgagaatcgcatgagaatcatggcatgagaatcaaggatctgtactggcaaaagaagctggaataataacaggatgacaagaagaacaatagataacgacattaaatgtttactatgtgccaagcacagttctgaacaccttacgtgaaatgtgttaattaagcctcaaaaattgggaggattgcttgagcccaggagtttgagaccagctggccaacatagcaagaccccacctctacaaaaaatttaaaaattagctgagtgtggtggcatgcacctgtagtcctggtgacagggtttgagactgtgtcgctgcccaaatctcatgtcaaattggaatccccagtgttggaagtggggtctgctgaaaggtaattggatcatagaggtgaatttcccccttggtgctgttcttggcatagtgggtgcgttatcatgagatctgtttgtttcaaggtatgcagcacctccttctctctcttcctcctgctctggccatgcaagacctgccttcttccccttcgccttctgccatgattgttaattttctgaatcctccttggccatgcttcctgtacagcctgtggaaccatgagccaattaaccctttttttctttataaattacccagtttcaggtatttcttcatagcattgtgaaaacagactaatacacctagctattccagaggctgagatgagacgatcctttgagcccaggagcttgaagctgtaataagctaagatcatgccactgcattttagcctgggcaatagagcaataccctgtctatttaaaaaaataccctcaaaaaacagcccttaacagacactgttctgcctcttttctacacgaagttaccgagacttccaagtgttacgtagtttgttaatgctgttgccctgctggctgtggatgagcctagatgcagacccgctgactctccaccatttgcatttaattttttttaaatttaagttgtattttatgttattttatttgttttttgtagagaaatgatctcactatgttgcccaggctggacttgagctcctaggctcaagcaatccttttgcctctgcctctgcagtagcagggaccacaggtgtgacactggtcccagctcagcccttgcttttagtctgcactctactttgtaccatttcatggagaggagaaaatgggaggacccaaggtgacctttagagagcagagcaatcagcaatcactttagaaagaagataatagctcctaaaggaaaacttctcaggtagccaagagaacatggtgatcagttggaagtaagcaaaagaagaagaatggactttgagggtgaagggagcacatctagtgtggaaacactgggagaggttcctccaaaaaaaaaaaaaacgcacgattgcaatgaacctggtatctactatgatctccctcttggaattcaattctcagtgtacacagagactccaggaagccttgcagctgaaaacccaatttagcattggtaaaaccagtgtgtttcagacacatgaaatcatgaacccactggtccaccattttctctttatacctctgtgaacatccttgtgtatgttcaagcatcctttacccaggagactgccctgttgataaatcacttatccacacgggctttcttctgcccttgagaggatcgacacatgtttttgtggagaattcaggtgattgcagagaagcatgcaggcccaaagttatggccacaacagcaaaccctagtcctcaggtaacttagaaggcagccacatgatgaactatagcaaaaaattcctttttgaggtgaaactgtcacatcccacgtcaaggctaccacacactgggcatggcagaaaagaggcgcagacctctttggccatccaacacagttccacagttggtaaggtccctacaagcaccattagacaatgcagcagactgcagcaagcaaaagatctacatgtgcattttataaaagaggacccaaaaggccaagtcaccatcactaggtaacacagagaggcaagttaagaccacagtggaataaaaaggcacacccaccagaatgaggaaggaaagaaggaaaagagctggaagggagagagacagggtcaggaaagaagaggaaaagagagagagaggaagagagaacagaaaataaccctgccaacatcgagtgttgataacgacgtcatgtcatggtaagtatcacgcacggctggagatggtgtaaaagtgatgctgtcagtttggaaaacagtttgcctttatctaccaaaacttaagatatgcatgccatatggcccagaaattatactcctggttgaaagaaatgtgtgtacataggtacaaggggaccagggcaggaatgtttctggtaaccttgtttaaagcagcctcaagaggccactgcacctccagcctgggcgacagagcgagactccgtctcaaaaaaaaaaaaaaaaaataccctcaagaggccgagcgcggtggctcacaactgtaatcccagcactttgggaggctgaggcaggtgaatcatgaggtcaggagatcgagaccatcctggctaacatggtgaaacaccgtctctactaaaaaaaatacaaaaaattagccgggcatggtggcgggcgcctgtagtcccagcaacataggaggctgaggcaggagaatggtgtgaacccgggaggcggagcttgcagtgagccgagattgtgccactgcactccagcctgggcaacagagcaagactccgtctcaaaaaaaaaaaaaataatagcctcaaggtagaaacagtgccaatgtccatcatagaatgaagacagaggttgtggtgtattcattcaacggaacgtcaaacagcattgaaaattagtacattcaaactacgtatcacaaaaaagactcacacaatccaaaccaagctacagtggccagaaaaagaacacatattgcttgacattccataacaggcaaaattaaactcttatgttcaggaatggatgcttaggtggtaaaactttaaaaaggaaaaatcgagggcatggttataataaaagtgagcacaggagttatgctttgtaaggaaggggaatgtttgatggggaaggggcaggagaggccatgaggtcttctgggagctggcaatattctatttcttgtctgggtggtggttacaaggatcttcagtttacaataatccatcaagctgcacatctatattgtgtgcacttttgatgtagtgtatattctaccggtttttaaaaagacttaagcaacctggatgagaacacagaccaactgcactctccagagcacgagatgtgtgctggtcatgacttaccacgcagcttcacctgaggacccacagattcctggcctgcatgtctgttccttctcttgtgtttcctagtttaatgaatgacagcaccatcccattctagaaaccagggaggcattttgtctcttcctgctcccaggtgttctgtattccattagtttctaagcccagtttatttccacctcctacacattttggaaacttatcttcacccttcacgcccactaccaaaaccttagaactgtgtaatctttaacctatattacggcaacatttccccatgttttttggttgttattggtggtgtttctactctcccgtctatataattttatttgcttcactgttctcagagggaccctcccgaaatgcaaagcaagttatatcatagttgtaagatcatcatcatttccccatcacctgtaaagtcaagttcttacctctccatgtggcacacacggtcatctacaacccgttgcccatatatattttcactctcatttcccgtaaacgtgaccacttgatacctcaagccctcttaacctatgaacctgttattccctgggctgtcaatacctttgttcctcctctttgcctggtcaatcccactcatttatcaactgttcaaggaccagatcaaatgaatcttcctctacgaatgcttctcttccagcctttaaatcctgtaagagttgactcttccctccttaggtttgtttagttcttatgtactaacacaggttcatgctcttttgctataatgtgttgtcatttctatctccctttcgagatcatgtggctccttcatggctttgtcatagtgatgcccatagttcctaggacaatgcttggcccaaagtatgctcttgatgaaacttattgaacaagctgaatgaagactaaatgatttcagtgatgaacctgtgatggtttgaggcttaaggcataccctgaagaaagcaagctcctccaatatttagtggcatatcagctgatcaaaaatacagtatttaatcacatgagacttttggcaggaaaaattaagatcctcagggatgtaacaatttataaataagtattgctgcaaataatctttctttatatataaaggtcacctgcaaacacacacacacacacacacatctacaaaaaaaaaaaaaaactcatgggtacaaggaatgatagaatgctatttcttagcactctggtctactgcatcctcctgggttcttcattgctgttgactgccatctcagataattcacaggtgggacgcaaaggaatccctgaggttcaaattgtatattagcacaactttgaggtatatcaaaagtaattaggttgcaacaatgttttttgaaatcacctggatttttccatcccttcctttttggagaacctcagcctctgcttggatgcactttgctttgccttctgaagacatcatctcccagctctgctcctgagtgggggatggaggctattgatggcagggcacctgtcctagctgtctattttaattaaacttttcaagctgtctctgggtggccagataagcaaaacaaaagaccttaggtcttttaaaaaagctatacactttctaaatcaccattatgggccatgtgtggtggcttgtgccagtaatcccagtgctttgggagtatgaggtggaacaattacttgagctcaggaatttgaagctgcagtgagctatggtcgtgccactgcactccaggctgggcagtggagtgagacccagtctcaaaaacaaaaaccaaaaaacaaaaatcactagtatgtgttcaatacagtaaattccatacacatcctaaacataacataaatgcaaacgttgttctcaatctgtggcaagatatatttatactttgtgttatttggtttggttcctttttgtctggttcttaggaggaagacaggataacagagcagaattccattggacagggttgtcattgggtccttgtgattaaatctatattgagggcagtctttcaaaggtgaaaatcatggaaacccataagtagtttccgggtctcttcttggtgtgtattgtagaacagagccctccactgcaggagcatcaactaatggtcctgaattgcctacacattcccaaagtctgcagcctgtggcatacccaatgacaggtagatttggagtaagtaaaatatggagcagtctgggagcattttgttggctccttcttcgatttcatcagatggtcccagctcagttatcagctttgatttttagatggtgtctggggagaagaacatttctagctcttgctcaggcaggaatggcccagctcctgccttcccctttctttgccagcattgtcctctaggaggatgacaaccccgtggggcacagaaccgcttctctgataggatctcttccccagggcagctactcccctagggaactgactgagtagagacatcctaaatgccgaggagtgatggcaccatgaagcccccagatatgggccccatgggtggcaaacaaggaaatgttccagatgccaacggtgctgcccttgtttatgaccgagaggaagttaacccatctccaagggaacagagtcaatggaaagtttcttgcgtttgccagaaaatgatagtttcatatcttgtggatgaaagtttgtgttctgagagctgtcatggtggagacatgcccttggaaccgaagacagacagacagaagatttgaaaaaagagtgaaaatgaacacaagtgacaagattagaaaggaggatgcctctaatgtcaaattcttatccagtccccaagtcaccttcccctggcaagaattaggcccttataactggaagttacaactacctctccccttcccccaaacagagggaagcaggtagacagaatattgtcaagagtgtacatttagaagaacaatctcctctatacagattacatgaaaagcagagtattataacttaatgcttcaggttacacttttactggaaatgatatttaataattaataagtcagagtacccaagtttaaagcctggttctgctactttcaagttgtgaattcttagacaaattacttaaagtttctgtgcctcagtattctgctctgtaaaaagaccacataatagcacctaacacataggaattttttttttttttttttttttgaggtggagtctcactctgtcagccaggctagagtgcagtggtgtgatctcggctcattgaaaccttcgcctcccaggtttaagtgattcttctgcctcagcctcccaagtagctgggactacaggcatgcgccaccacacccagctaatttttgtatttttagtagagacgggttttcaccgtattggccaacctgatctcgaactcctgacctcgtgactcacctgcctcagcctcccaaagtgctgccattacaggcgtgagccaccgcacccagccttgggaatttttataattaagagaaaaaccatatctgaggaaattatgttgtgaatgttagctattattgttgcatactatctgggacagaaacctaatgataggtgtacacactgtcttggtgtctgtgcatgcgtgtgtgtttgtgtgtgtgtgtgtctgcaaaggggaatttcaggtgatttgtaactttttttctttttttaacagtgtgtcatgacagccagaggcaggcgattccagtattttaaagcaaacatagagatgaatattatctctccagttaagccaatggaagaagttgggcttaaagttgagtaactaaagtagggtaactaggttgctatgtatgtctcagtggccaggacatgctctgtaatcaatgagttgttttgtgagttgggtaagctggtcagaggaatgaaaaaacagaacatgattcagaaagcaatggccttcacctccacctgatcattgacgccccgaccctgtgaaagacacttgacattttgtacttcaagctcctcctgtaaaagtagagacgtggacaagagtccatttttaaagtgcagaggtggtttaaatcctttcctcatcatgactgagtgatactgccaagatctttcaacattaagtgcctattaagcgctctcctttctggaagtctaggttcctgggcctaaaactagtaataaacttatcttacttctaacctggaagacacatttttaaattaatatgactatgctgtatcaactctgtgatgtgccgcacagggatgtgtgggtctttgtgtttggctgcaggaggcactgttgttgatcctatggtgccttactcaattagatgcttcttggagcatttgaatgaggggctagcagggggtgtgggggtatggggtgggagtggagggtgagtagtggtctgtcatggctgtatctctgagaaaatgggcaatgtcagcttacaattggaatatcaaaagaactaagctccagagtcaatcatataactcactttgcagcatgcagctcagcttttgaggggtggtatctctgctgctgtctagaaattctgcatcaaggtaactgaaaagaaaaacagttacctaccaatgaaatgttgtcccctacagccttccattaacatgttctgtttagtactgacatacgaaaccaggaagcgccttaatgaacttgccgagccttttgtgctatgacattgctccctttgagcccagcctcttgagaaacagacaccattctgtgcaaggcggatgcttgaggttgatgtgggcctgtactgaagttgccttctttcctttggaagttcttctgcgtgcttccttgggagcagcacagagcccctgcagccctccctagtgctaacccctccagcctggacactctgcacagccctcctcatacctgacacactcattctgattagcttacgatacagagacctgggaatatccatacccatccagcagcccgtcatgattcagattgtcagggaattggaggacagacagggaggcctgttttctaatcctcagggttttatataatcctcctggttttatgatttctaatcctcctggttttatgattccaaagggttcaaccacctctgttctttttcttagagctacaagtctgtttggttctcaagtggttaggatttcctacctttttggtatacgcgcattctatattaaaacagctccaaggtgatcccctgagaagtttagactattctttgctaatggggttggcaatgtcctagtaacccaggcagtgtatgccttggcctaaatagtagggagctggaaagtcaaacaaatgttatcggaatagctacacataaggttcacgtctttgagaggatagtgtcagctggaggagaaggggtgccatcccctaccctcgctggatctctgcgagtggcttcatgacgactgaacaggacttgagcctgtaggagatggaagattgatttcaggtttcttatgtaccattctacagagtgtgactcacgctgatctcagaaaatgaaaaagaaagaaagaaagaaaacaaagctaagcaaattcagcaaaacttaataattagtgaatttcaataatagacatatgggtttattttaccatgtttctgtgatgcttgaatattttcttaataaaaaatcaaattcaatatcgaattgaaggattcattatggaagacccgcaaggaggttttaaaagaacaagcaggaggaagtttgcgtttgtttacttcccacggccagcgtgttttgcggctgacttggatttctcctggtgaggcagactccaggatcacacatttccagccatgtgcccaaggcctggtctaaaactcttctttttattctctttagtaaaacatatggctattccgaacagtatttattgtgttacacacaaaaaaacttatctacgactgctggtatttcaatcgagtgtttcttgacagttctctggtaaagtgattaaccagctgtctttttacttttaagaatatgctttgcttctccactccttttttcccattcacatccttcatatccatcaggaaaagctaggtatattcaccacacagtctcaaatttgttagataaaattcctgacccttaagaattttgtctttaaaatagaggcaaaacacataaaataatgtctcagtttcaaaggtcattatacctgagttctatatgagtcaaaatataggttaagacgctgtaatcaggcctctcccaaaacagtggcttaatcaaggtagaaatgtatttctctttcaaatagtggtctagggctagtggagcaaccttgacagccacagctttgactctagctccaaagtggctgcttcagcacttaccatcacacctatgacccaaacaacagggaggagtaagggaacatgagaggctcactttcgttccttcttaagacttggccttaaagtgtatacatcccttctgctgtcatcccattgcccacctaactgcaaaggtgggtgggaaatgcagtctctagcatggaaaacagggagagatattggtgaaagctagaactgtctgcctcaaccagctagtgacacatcaggactcaaattcgactgttttgactctgcaattggtgctatttaaaacaggaaacagcaagttaaaaaatgatttgttcacaaagacaaaggagcacaattgctgccccacgtgtcttcaggagattctgcaggtaaaagttttgaaccaatcctgtgaagtaactggcctttgcaactcacagacagaagtgactctccctattcagtcacactttttgcttggctttatctttcacggaaggctaggaggttttccagctttctacatggaagatcccgttcttcctcactttgagattgcagagatagctacctgaacgcagatccccgtagtcataaacgcagtcaaagaaattttgattcaaaaatacactatacaaggtcgtagccagaatatatgttccaacatgccatcaattctctagtaatcatatgctacttagaaaaaaatcaataccatgaggttggctgcagtataacacacaaggaagagaaccttttgtggaatttattttccattagattcttgtccagtgctctaaattccagaagtgattggcttcctacatgctttattcattctgctgactcctcccttcctcctttcttccagtcacatcttttgaatatgaaaaagccatattcaaagcttaatgtattcttcatgaaaaacctttaaggccatctcaataagcacaaccatttcttatttaataaacaatcgctctctcattaaatgtaaattagttctttatccttagctgtatttgttgaatctattacttactgtgtttaccaattttgtttcctttggctccagagctttctgtaaactactcataaatatgaagttgaaaggaaggccctttctctgtgtgtaagcacctgcacaagccactttgaacagccctcttcttcaagtcagctctgtctttcccatgcccccaggctgaccatcccggctacctacacatagggcagcaagattccgggtggcgtgcaagatcaccctggaccttcgtctctcagaaaagccagtgtccaccttcctagttctgtgttgcaaaagtcagaagtggctgcaggtgcaatctgaagggaacaagcgcagtcaggcttttaccgaggagaaatgggttatttcggtggcagcagcatttggcgcttccattcactgggccccaacatgtccaagtttcctggcttagaagggcacagtgtaaggcccatctgttccagcaggctttccctgattagataggatgcttggcaaacagaatcccagataatggatatttgaatatttttgtaatttccaggcttgtgcctaacagcttagcagttggccctatgtttaaagaaaatgggtaataatcatgactaatgtggcaatttccattcaaaaatttccaatggtgcttaattaaatcttccaataacatttggaaacaaaagttcccccatccattgtatccatgaagaagacagagtgaaaggatagtgggtggactcttgagacactcattgtggccaaacccaaccaaggcaaaaaactgtggccattcacttagttacagatcccagaggatcccctacaacccagccctttaaatggaactggtctattttcattccttcagtctccgctgggggacaggcaggaggtggagtgagagaacaatttgttagtatcccagatactctgttattcccaccgcagagacacaactactgcattgccccacactttcctttcctggcccgagaaagcctcattccttcggccttcatcatcatccttcttcttcacctccttttgtttcctttgcctcatctatgaaatcaggcaaacaggactcaccctttaccctctagggatgttggaagattgataacatgtcaagaaacagactggatttatttgaatttcacaatgtcctatttaaagagagaagaggcgactgaataaagaaatttggaagccactctctgtgattttatttttaagtcatttttctctctgttattactattttttattttttaggatttttttggtctggttctactgcaattcaaagtgttttataagggtcccaactggtgctgggaagcaggccacgcactgaagcagggcagagagaaggaggatgcagccagtcaggcctggggaccgacagccctgtcacgctgacttatgatggatgagggaaaagtctatttctcatccgcagtgggggaggtgaagtgtaaagaaagatgctcccagagtctctgggcgattcatcttgcagcagataaactctagaagctacagagttgtgaaggagagagaggaagaattgaagaatcaaattcattatgtgaagtataatctcatgaggaaatatcaaaatatgtcagcagcacccaagacgggaaggtggggagagggtggggaattcgctgatggtatttgtcagttgctaagccaggcgtggaggggagagttcctgggttccactgctctcctgcaaacagccttccccaccaaattcccaaggaggcccggcagagaccatggcatgtcatgatggatgaagccaggagatgcagccagcacacaggagacctctttgaaggcgctcttcccctgtctaaaattcactttcgctacttttccttcgtgtttcttaaatttagactctgcagaaggctaacatagaggttagatatgcataagtaatcccattaacagtggtacagggtgctttctttctggaacattttgtaattatgtctttcctaaccacttcctgtttgttcccaaattttagcagagctctacctggcgacaaacagcccgaaccttgcaaatgaaaataatttggggacccatttcctgcccctttaaccatgcttagtggactggaattctctgagtcctgcatatgcatgaggtctgcagacctgggccctccatggccccagggggagaagatgcagaaagcttctctgactctgggcatggggcaggctctgtcatttccatctctgtcccgcttctcattcccagagtgaccttgggcaaatcactttcacctccttgagactcagtttccacatctggaaagctgagataatagctacctgcctcctgggggaaactgcaaggcttaattaattaatgtttggcaaagcttcctagacctttgcttgaaagaatccatgcaagtgcaaattattattattatatcactggagccttagctccaattttgcttctgaggctaatgattatttcttttctgaaggaaaatattaattttaactccaagtaatttatcgggtagtgggaaaaaaaattaccatttgtcaaggacggcactctctaaatggaagttctagcagcccctctctggggaagactgcaagaaaaatcttcctattttaccatcatccctgggcatcttctctacaaggctcgtccctgctcccctttcttcactttcttcccaccgggtgatgggtgttagcctgggcgggccagggccagaccttagctgaacttgctttctatttctcctgtgacagctccagacactttttttttttttttttttttttggctcagcacagaaaccaaataccacatatttttaagaaacaatacttagtacaatacccttggattgatttcaaataactaggcaccctctctcttaaaagtttcaaactaatttactgtgtcaaatgaacccccttccctaagacaatggcctgtgctttttatggtgataaaaatagtgcaaggcattggtggtcattttctcctttttgattttctgtccatgaggcttaatgaatggcctggctctctatgctaggttcccaatggcccctagagcaaaccatctctaccgttccttcgctgtttttaaaacagcctgcaagtgcttatgtggctgcgttgccaaagagagacctgactctgctccccagaccttgtcctggtcctgcaacctgaggccaccaagaaagtaaaattagtctttgcttcactaggaacactgtaattgcttatcagcttcaactgcagaagcagacattttgtgcaaggctttctctgccagtggtttatgccccttgattcctgcaggttcttttggaattagtcagtatctactccattttactaagggaggaactgactaaccatgaggtccttttcactccctctttctttcatcctggtgcagatagtccctatgccaccctatttatttatgccaccttatttatttgtttgtttttaaacaaaggaaaattatttcccataattctggaggctggaagtctgagatcagagtgccaccatggtctggttttggtgaggactctcttcctggcttgcagacagccaccttcccactgtgtgctcacatagtagagggatagggtgggtagggggagagagagagggagggagagagagagagcaggctctttagtgtctcttctttttcaattttttttttatttttccagcttttttgaggtattgttgatatacaaaaatggcacataattattgtatacaacatggtgagtttggacatttgtgtatactcatgttatcatcactaccatcaaggtaacaaatatatccatcacctccaagagtttcttcatgtccattcattttacttcttttattttaaattttaatttcttatggcaagagcacgtaccatgagatctagccccttaacaattgtgactttaatattcattttcctctttgagccttcttcagacgttgctccctgcaagaatattcttacaacacacatgctcagacacatgctcacatgcacacacatacacacacatacacacacacacacctttcttctgtaagtgaagcccttcgcttcctctacgtctgcccatgtgtgcactgcccaggccgcaaagccctttcccttgctgtgtttctagtacctgtcacctacaccgccatgcggtatgggacaggacgacatactccttctttggtccttctcacatcgcagatgcttgcggtacctccccctgcatgagaagaacagcacttctgagggagctgcagacaccctggcgcgcatgttggtggtctgctcaccccaacactgtcccctgtgaacacagggagcagcccccttcctgcagctgacccttcaccgcctctccagggacctcctgcctctctgtccacctccagcctcaaccaaacaccagtagcttcctgaacactttgtttctcattgtctgtgcccttatccatgcttgtctctctgcctggcatggcatgaactcttctttctgtccagaaaaatccaaccaatattgttggcccaggtagagcgtctcctcgtgaggtttccaggtctcctcctgcctcgctgctgcctcccaggcggtgagagcggggttggttctgttctcatgccattgccacaccttgtacacagctcggttgctggcattctccatgctgggctgaacatctttgttgtcatggctccttccccttccagccgcagggcattgtgagagcagtgtctggactttgtatggtactcaataaatattggatgcataattgagtgagcaagtaagtgcctttatgttctccatttttagagcaaaaatttatcatacatttgagccattctgcagttgagctagaaagatgtctgagaaatctgcaaagggccctgagatcctgtggggactctgccccgtgacttctgaacaccctggacctggggcacctcactggagtcatctagagcccccatgtcctcagcacaaccatgtaactcagttgcccgtcttttgcctagcattctcaagggagaatcgtggtccttgtgcggacccatctacatagtcaggaagttctatttctgttctacctgaagtcctatcagccccaaactagaaaacactgggttttagaaaaggatgggtaacctgtgtgcacctcaagcctgaagtggttaggaatgaaaatgtgatgtcgatatgagatgatattattagaaacctgttaaatggactcctgacttgtgctcttaacgtctctcccttccagaaaactgccccacacccggtctcattttgtgcagtcaatataatcctgataagatctatcacggcgcttatggtgcgagaagaaattaaacatttaggggactcctccagcgccacactgattgagctcaaatgatgctgctaagttgacagatgcatttgtctgttcttgctcgccagtaagtctcccttgcagaatgtacaaattcctttacaaggatgtaaaaacaaatcaggaactcctttatgctgctttctccaggagggagtctccccgtacctgccactggtgcatgtgtgtgtgtgtgtctcgatgtgcgtgtgtgtgtgtgtgtgtctgtgtgtgtgtgcacgtgtgctagatgcaaggggcatgcagaaggagagccaaactgctgctcgactcatcatccacgcagtgtgagtctcgagccttccaaggctgaccctcttttccccgccattctgttaattgagccacccgtgccaactcctgaaatgcaaggacagtcttgtcagcaggggaaggcaccttgcacctcttagccaaatgcggcacaactttaaaccgattaataaaactcttaaaaggataatattgttgggcaaagtgctaaggtttcctgctttcgcttgggttgtatttttattaagctgtaagccttgttctgaaaaagagagagggggaagagggagtgagaaacagagacttttatagcctgcagcctcttgtttgcagattattttccaaagatgctcagtagaatatcaattgcctgtgattagaagtcctgcccggtactaccttgaacagaagaggctttagaagtgaaagcagttcctcagagaagccacacattttagtcttggaaaaatctctcagctggaatttgaccctcaaggtggtcagagctaggatgtgggggtggagcttagggggttgggtgtaagctggggagatgggcacgtttggaagctcccgttctatttcacctaaggaacatgtcttttcctcatcaccagagagaccctgtgggggactggggaagagaggggctgggagatgcttggtgggaaacctaaaaaaaccctagaggccgggcacagtggctcacgcatgtaattccagcacttagagaggtcaaggtggatcacttgaggtcagaagtttgagaccagcctggccaacatggtgaaaccccttctctactaaaaatacaaaaattagccgggcgtgatggcacacacccgtgatcccggctacttgggaggctgaggcagggcaatggcttgaacctgggaggcagagtttggcagtgaggcaagattgcaccactgcactccagcctgggcaatagagcaagaatctgtctgaaaaaaaagacccaaaaatctagagtctggccagagatacctgggaaagctctgacctggaaagcctaaaagacgtgtcctattggaagcattgctgctcagggcccatcctgttaactcttccagttcatgaggaatacaacttaccacaaacattaaaaaatcttctttccattttaataaatagtgataatttctaaatggaagtatgagcctgcatcagctcagttgtgtaaatgttaaagtcctgcgtctttcttccccaaattatttcacaaagatgctacttgaatccattccacttgcccatcaaaatgagaagatggcaccagtgaaggcagaacagatgggagagatggaacatcacctgggttcccagggacccaaattcttacagacatttgtagtgacagaggtgcaatcatagcacatggtatgtgcccagtaattacttgctgaataaataaattcataaacagtaatgatggcatccttattattactactagagcatagcaaacactactgaaaccgcatcatcagctgagagcacagtcctatgtgttttacatatagtaagtcacagaatcctctcgacagccgaaggaggaaaaatctctctgtttcagtggtaaggaaagtaagttcaatttgcctaaatcattattaattattcataaatgaactatcctccaatcataaacagtaaacaaaaaagatgtggcaaaagtggccagcatctctagggcattgaccacataccgggctcagtcctggactatacctcagtaaatcttcacagtcctcttgcaagacagtgaatattagatccattctacagagaaagaaactcactgacctgttaaccttcacttgatatggtattgtcatttcacaagtggggaagctaaggcttagaaaagctaagctctttgcccaaagtcacattgcaaatgccaggagttagattctagcctagaaaagaagagtgagaaattctcctagtctcatatgacgtcatagcaactgtccatctagagacctttgcatagttttgattggtcagatgtgaaaagagggtagtcttcccccaacacaggctgcacccacacttctcatgggagtctttcaacaccaccactgagacaatccaacatggtgggaagagatttcttctgcacatactgggcctagaatccacagcctaggtccactcacctctctgatggtttctcattccaccacggccagttgagtatggagcaccagcacgcattcaaagtcagccttgctaattagaatatgagggggccttagtaatgttggggaggattacaaatatatcagttcacattactgagcttggcccagctgtatacttaatagctcccagatgctctctctctctctttttcaacagctttatagagatacaattccagaacatatcattcacctgtttgaagtatccacacacttggcttttagtatatccatagaattttgcatccattactgcaatcaactttagaacattttcgttatccagaaagaaaccctgaattccttaggcatctactcctgaatcctaccgttgctccagtcctaggcaacccctaatctgctttctttttattgctgtttttgttttcgttttcatttttttttttttttgagacagagtttcgctctcgtcacccaggctggtgtgcaatggcacaatcttggctcactgcaacctctgactcccgggttcaagtgattcttctgcctcagcctcctgagtagctgagattacaggtgtccaccactatgcctggctaatttttgtatgttttagtagagacagggtttaaccatgttggccaggctggtctcgaactcctgacctcaggtgatccacttgccttggcctcccaaagtgctgggtttacaggcgtaagccactgtgcctggcccctaatctgctttctgtctttataaatttacctgtcctggacatttcatatgtcttttaatgacattttttattcctacttttacactcaggtttttctctatcttaacttttctttttttcttctctctttttttttttttttttctttgatacagggttttactctgttgcccaggctggactacagtagggtgatcacagctcactacattctcaaactcctgggctcaagcaatcttccctcctcagccacctgagagctgggactacaggtgcccaccactatgcctggctaacttttaaaaagttttttttgtagacactggtcttgctacattgctcaagctggtttcaaactcttggcctcaagtaattctcccaccacagcttcccaaagctctgggataataggcataggccaccacgtccggcctgtatctctgttttctaggcctaagaaagacctgggccttcttgactccagctgcatgctcacactttccagcctcagaaatgtcactttagaatgggctgaagttctgctctggcctgtggtccccactcagggaagctcctaggagcttgtctttttcttttaatttctgcattcttcccagatatcatttattctgtctatatcagtcttccttttcctctggtctttgctcttaagacttctaagtctgtgctcccataactgaaaactgcacagaatcactcgaagcttattgaaaaggcagattcttggacctcagcttcagaggccttcattcagttcatgggaatcagcattatttgtaaggcccccaggaagttctgaagtgggtggtcctttgatttcactttgtaaagctctaactgtcctctagtaatactcctcggccgcgttccaggaacattctccattccttggttctggctctgctctagaattgattcacaaatcctaaaattttctaaaacctagaagcaataaatgaaccttgaaagagatgcttttagaacaaattaaaaggagtgacttagtagatcacaaattggtagagtgtttacccgtaggaaacagtgcaggctataataataattcaaaaacaaggccaggcgcggtggctcacgcctgtaatcccagcactttgggagtctgacgtgggtggatcatgaagtcaagagatcgagagtatcctggccaacatggtgaaacctcgtctctaataaaaatacaaatattagccaggcgtggtggtgcgtgccagtagtcccagccacgcaggagcctgaggcacgagaatcacttgaacccaggaggcaggtgttgcagtgagccaagatggcgccactgcactccagcctggcaacagagggagactccgtctcaaaagtagataaataaatacaaaataataaaaattattcagtaaacagaattgcctattacatgctaggcactgcagactcagaaaggaacaagaatcatacacccctggctctccagagggaagagagtggcggagaagacagccatggaagagctgattaaggcagcatggcagtgcagagtggtagttaagagcaatggctttccagccagttgtgctgaatcccagttctgctgtgcggcctcgggcaagtcacttagctgctctgtgcctcaaattattgatttgaaatggggataatagtggctcctcatggcattgctgtgagaagtgcttcagacaaggaggtgctcaggaagtattaactattaggtaactaattaaccatgcttttttataaatgctggagttggggaggggaagtgcagttagtagcttggccggagctgctcacttggtctgaaagactctgatgaagtgacattgcagtggctccaagcgccgtacttgacgatttacatatattaacacgaatccccaaaatcctgtagagtaggtattatgcctgtgttaatctacccaggagaaaactgagctttccaggaagtttaagcatcttgcccaaggtcatagaactggaaatggcgccagctcccaggcaagctcttagcatgacaggccagcaaagatgcaattctgggaggaaagctccattattagttattgggggaaaccaaaacattttaaaataactgtgccctctcacaggctgcctcttggcaccacagtcaaagaagaatgctgagctggaaaaacgttgtgtttagggagacaattcttctgtccttctgtttatgttctttgttaaagagcacggtgtaaaaagacaaaagagatgtcggatttccttctctgaaacagatcccacagcacagaaggctgcagtctgaatcctgtactatttaattaaggcaatacaggacttgtcctttcagaactaggtcacaagtgtgcctcagcacagagactcctttttggtaatatgggctttgggaggaagagagcacatatgaaaaaaagtgaaatctgtcttccaagataccagctttctgtcttgggcagggtacagtgggctaggcgaacaatttgaaacaacaaccacagcaatctgagaccctggttgggccaatttaaaagaaatttgacccatgctcagacatttcataaactcccattgaaatgcacaaaaacatgcacatcaggtcaacccacggtgcttggctggtgggtcagtgtgtagccgggtgccctctcgcatgcagagaaggacataggcacacacagggcagcctttctctttcagaaaggatatcactggccacagtgcttcctagggaggccacggggtcagaccatcagaggtgccctgatgtacaaggggagcctggctaaaaggtacagtgatctgtgacaagattcccatcccagaacccaggatccttctgatacagagaacaatttaagatatttgccccctaaggacactcttaggcattattcttctccagaattaaaagaaccaaaactggaccatccgtgactcctgtcccaatcttcccatccaggctggatgttaccattttccccatccctgcttccttccctttgtcttcctttacctggctatgccttttgacctttggtgtgacaaatttcagctgccactaatgttcatgtagagcatgtttctctttcccttggatgactgtgcgcgcattgaaagactttgcagagacggctccctgaatagaaatgcatgccagacaaacaacgcgagcagctcagacatccccacagaggctctgggagcttaaaaagcccacgtcaccctagaaaagaggctattaaggtgtggcgtgatttgcactttcaggcagaagctttttaagctgctgcagagcccaatcacagggagatgaagacttcagtttctcaagatatgcaactcttctgctgatgaaggagaatgttcccgggtgcaggtggagtgagaacgggttcctggcacacattcagcaacctggtgaggagagctcggaccatgtcgccgtcacctcttgtctgtctgctccccatttccctgcagcctccagagccagcataaggggctggagaggaggctcaggaccatgtaaagatctcagtggagctgagcagaacaccactgactctgcactccctcctcttgacaaggccctggagaatccctaaacaagaagcagtagcagccgaagcccaggagcatgtgctggagagggtttgggagcaactggtaaagtctgacctgctgcccggagcccatgtcatcttctatcattcctaggaggaaaattagacccagaagcctggctttggaacagggaagactggggtttacattttggctctgcttatttgtcattgtgtccctaagccacagtttgctcatttgcaagatttctgtttttcaatactgtagaaaggaacagatgaaaagtcttgcataaagtgcctcacagtagaaaaccaacataaactagcctatgtgatattttcaaatggcaagaaaacgaagacagggactcccaaccagcaggggacaattcagttcaactgaaagtaacttcagttttctcccattgttgggtagaaacagaatttctactctctctcaaagtcttacccggtaggtgaccacctctcccaggcacatcccgctcctccaaggcctcgtcttctgaaacagttccccctcctatgattgccggggagaagctggaagaaaaagaaatagagattattttcgttaacaagtgccttctatccagatgacatttttctgctcccaaatctctcctgaattggagtcgtaccccgtactgtctctccatggaaagatcgggccctttctcttgaagagtgagaaactgaaggcaggctactcagtcatctctcgagttggtgaccaaaatgtgcctgtccccacatggatttcttctagggggctggagcactgtccacctgcgggcactggaatctccaggagtttcttcttttgctcaccagacacagccccatcacatgagccacagcagcctcatgctagcttaggggataaaggcctgcaggctcttttccttatttttaaagcaaattgctctattccctctcatggcttcagcacgtgggtgttggggaggagttcggctgtgcaggtgtgggagctagacgcccagtgtggtgtctggggagggttgatggacagcagctctaacgtgcttagagagtcaaggctggctcggcctttggaaatccaaataatctttaaatgccaactttatgcttcatagttatagtgaaccattcaggggtggctgcaattcaggaaatgatatcactgcactccccagtccagttagtgacccattagctaaaagctgccctgagtgtccacaagcccccattctcaaagccccctcaggtgccccactccctttaattctttcaacatctaggaaaaaggcgttgttcatactctattttacagaggcataaattgagacccagatggtggtgatgtgacttgtcccaggttatgcagtgtgtgaggggctttcagagtcccaggcctaaggtatccccactgggctacactgacacactcaagaaatgcaaactagagtgtgtgtatgtgcttgagtgtgtgtgtgtgtgtgtgtgtgtgtctacacatgcacctttacattcacttaggtagggatggctgggatcctgtccagtgatctacagtcaatgccagtcccagagttccttgggtgaagaagaaagagaagttaggagaacagtggaaggaagaggtgtggcctacaccttgtaaaggaagcaatattattcctcctgggaagtcacttgtctccccaggctttgaatggaaagcagcctcaaagtcccttggcatcgacgggggctgctccctccccactccccactgttacctctgggaagacctatgcctggtgctgaggggacctttggggctatttgaatagcagcaatcctcctgatttgcttctctccaaaaaaccccctacttggctgtggcctgagctctctcaggcttggaagagactttagacagcaagcacttcaatctatgtttagtgcaataatctcctattcagcaggaattctcaaaatttttctcagaaaaccagtccgtttggatgactctttaataaaatggggataaaggctccataattcgccagtttaggaaattgctggatacctaccctcctctgaaagagtcacagtgaacttcagcatacaaaggctctgagaagtcctgcaacaaggaaaccagtttaacattgttaaattatggtaagactaataggcttttatatagacacactttaaacatcttctgtgacagggagccccccgtcacattaaacctttcttccaaaagtacacttacagtatatgtctttgggcctatatattttaatttctcttctggttgaaatgtttctggagtataagaactacataccctattatttatatggcagtacacaacatatagagatgttcagtactgctctttccaataggacatctaaggaaaccgaagcataggaagtggcacagtctaactgaggagcatagttaatgaaattagggtgttttcttgttagatcgctataacttttagagttgagatgaccgaatgggaatctacctttctgcaattcccagcctgatctttctactttcactctatttccttctactgtttagctgaatatcttcaagaaagtagtttaatggtagggaagggagtggaaataataaaaataatggcttatccttccccaattcaaaaagacttcgaagtgcagatgatttttcacctgcagcgcttggatggcatttacctctaacgaactaacatactctccctggctcctggaagctcctgctctctccaggctcactgggtgctctgtggattccagatgaattatctcaagtggcaaatataccttaaaaggagcagaagtgcaatgcgtcttctaataccagggttaaaatttcattttattccttgtctgatgctattcaggactgttatcttccttcgtgctcaataggcaatagaaatatatatgtcggcagaaagccaggctcagacacggtatctagagaaggtgggctggaaaaagggagtcagtatgatttgtgctcccttccttcctctctgctcctaccaattagagaagggaaggacccagcccccagaccataaataacagctcgcccctgaagtaatatggctttgctcacattggctgcatattctataggtttgcatccttttcaactcttctccagcacagctgaacaaatacaagaggaaacagcaggatgtggatatttgagggctcttctttcaaaagaaccaggattggtccatctaaatgcacagaagataaagctcttcctagcatcctctttcctccttttctggttccccattccttacttcttagggtcacagccctgacctgccttcacccattgtcttatacttttgctcgattctccacccccaagattatcagagcttacctgtctttccgcttcttcctttcaatgttctctcaactagacacactggagaggctctagttcacaccaacccttcaacgactggcaaagactgcctccatgtaaacataagaaaatgcctaactcaaaagaaaaatataatctctaatggtagattcacataggagagctcatgagaatagtttccaagacccttccaagaatggccaaagggcatctgcctgcatcaaatttgataataagatgatccctgacgtaaataataacataatcattaatggcaaagtttctggagtctgactacctggattgaatcttggctctgtcagtttcttactgtgtgaccctgaggaacttcttaatttttttccacaaaatgtggtgcaataatatcaccaatgatatggttattgcaagattaaataagttaatctttgcaaatgtttagcactgtgcctagcccattgtaaatactcaaaaatattacctctcaatacatggatactaagataaagtcatgtggtatacaggcacatttcaaggactttggggtcaataaaacttgagtttgaattttggctcttctgattactggctgtgtgatcacagccaatttatttaacctccttttagcatcagtttcctcattggtaaacaggaataattgcatttccctcattaacactgttgtgaaggttgaagaaatcatgtatttgaacataccttgtagctagaaggcatcaataaatatttgaggatggggaaaacatcctctgagcagatagcttgaaaaaaatgacaaggattctttggggcatttagatgtgtgcatttcagtaatggacttacttagtcgctctgtcctgaggctatctatcaactcttatagcacttctgtgaggcacagagcaaatgtggataatggtgtcttgattttattaacaaagtgagtgtcccaagaaccagtcaatatagcacaatcaaatacaactccagacaggcagattgcttccttcctctaaagcagtagttttcaaattgtattttgcatttcactttttcaagaaggatctaaaataggacattattataatatataaaatagtaacatttcttggaacgaaagtggctagagttgtgcctgctctgtttctccttcatatcccgcggtggtgtctgcagtacctctaaggaaatctaagtctctgcaggatgcagcttcaaaaccaatgctctaaagccatggaattttcttcagactcttacagtgtgcagtatggattaatagtgatttcctactgtcttagatttattaagattaagtcatgtcagacaaacctcatttcctactttgacagtattctccagggaaatgtagtgaattggtatttcaggaaggcattttacaaagccttttgtaatagctttattgcaatgacaaagaagtttacactgaataccagtaaaattaagtgtattagtaagtagatgaacaactatagctaacaggtactgaacaactaactgatcaatgtcaagcggcaggctgctaggacacctaggacactggctgtgtcctgtatcattaaatatctccatcagcaagttggatgaagacatagagatgacacttatcaaatttgtgcatgacatgaaattgggaggaaaagcaaatttatcaggtgatcgaatccagaaagatcttgtcaggctgacagaatgggccatatctaagataatggaatttcacagggaaaaaatgcaatattttataattaggtcccccaagcaaattattcaaatataggtttatgtcatatctgatgtcagattcagttatgatctatctaacggcaggaagtagaggctctttgaaagagtctttcaggtagatttgagcagtagataatgggatagagaaaaaaggccagtgcatttagggacaaggtggataccacaggggagagctgcagggaagtggggtgggtcagagtgggtaagtattccagtgagaacagagacaggggagctacatacataaaataactctttcattcattctttctgaatatattcatcatgaggccagagagtatggcttttaagggcataggctctagactcaaactatatgaaattcaaaattggctttgttacttcccagctgtgaacccttatgcaagttacttaacttctctgtgtctcaatatctgcatctatggactatatttgtaactatctccctcatagggtgatggtgaggatccagttcccttatgcttatgtagtatttattattttgacagtttttcactaagtacacagcctgattgaggaggaggaatgagatacattacttcttgtgaagaaaggctgataaggttcaagcagagtatcccatgcaggaggttcacaaggcctggaagcttagcaagatagtcacaggaaaaagacagaaagccaggaatcagaactgcataacatggaggaaaccggacttggggactaaaatagaatttaggcaatcaaaagaaatgcaaggtctgagtccagctaacaattgatggggagcttgaggtgttgggctgctgttctttaaatctcttgtgtttgagatcaggattgattacagaggcaaaatcagggtggagactgctgtagggtcacatggaccctgctctgaggagcaatgggaaacagaggctggaaactaggaagagcctcacagattggagaagcagagcttagtcatagcagggcagcaaaagaagacagagagaaaacaaaacaaagcaaaacaaaaacagaaatataaactatctgttttgctgattgtaagtttcccacaagttacaagagtgaggttccctctcccttttatagtatataaaacaaaatattcaagagttctgcattactgtaaaccagtcaggcagtcccctagagtactgtctaatcattgcatcccatttttaaaaggtttgagaggccccacgtcggcctggaggataatattacaggaccccataatatgtgagcaaacaaaatagagcttttaatgtccctgtgggggaaccaaagccacgtccatgcatgggaggaagacctcttacagtatttgcaaggctatcttctgaaggaagagtggttgatccttgctcattttgctgccaaggaccagagaatggaagctccaggaagagaacttttacatccaaagtcaatgcaagggcagagatgcagggcttcacctggggaagggcatacctcccacggctgggaaaatgtgctcaggagtattccagcattgcttgaatgggttagatggaaatgttgaaaacctttccccaacatggcattctatatttctataaaaactactatgagacagttgagtgagccccatgattttggcatgcatcaatgccatatttagaatggctgccctgagcaacatttttctctgccatcttcgcagtcattcctgggaagcaagctgtagttctctgccgagccaggaggtggagatggcctataatgtacccagagagcctgcagggagggctgcgtgatgaggttgagcagtggggctatctgtgtggattggcagccataaaggaatccgagagctcatcggccgccatctgtcttcattttgctaaccccctctattggatgccacaagcagctcacttcctatatttataaacatccccaatcagtcatttctctgcccactgtcacatatttgtggcattaatgctggctgctttatcacagattggacttcatttcaggcataactctcatatactgtggttctgagatctttatagccacattacggtatatggctgagttgtgattacacatcagtactgtgaggccactgacagcgatttggccctctcccaccacctgccacacctgccctctgagggcagctatagatcatgctagagacacaggaaaatgggatctgtgagggagagagagagagaacaaaggttaaggcacacactctccaggatttagggtaggccagggctattccgtagggctgagaacccacagaactgtctcctattggcaaagtgacctgacagatggagagagctaatgggaggggatgggagttgagaaggagtagtctataattgaactgacctttctggttgcccctgatctcaaagccgacagtgggtggtagacttccttttctgatgtctgaaatcaggaatgtaagttagcatttcttcgtattcccttgcatcatgcttgtcccattcataagattgctctccttgtagagatgaaaaaagaatcttttttagtcccactgtgtttgggttcttgtagctgtcatgcacggatcccaggaaccacagtcgcaggggaagtcgcaaaagttctctctcatggaagtcacagtggccaccaaaaggtcaaaagtaagagctatgcttggtcagtagacaacaaaagagcttggaggcaggaagcaataaaattttagggaattatgaggccctgggttattgctaaaagggtgtggggtatggggtttgccacactcatcttcagagagagtattttttttattctggaataaaacaactttttcaagtcttcttggtcatggcttctccttacaactcagagagacagaagagctcttttccccttggtgggcggagcccactgctcttgcgggttgctggcagtcttcctggctcctgactagccttccacctctattttcctcttgctctccaaatgtgtagatactgttcttttcctcggtccccagggaggcatggaccacaagatattactgaagattgagcggtaacagaggagagttgcttcaaggagagggaggaagtctaacagagtcagatgacgaaattacaacgaatttagttgaaagctccatttggattttacttttgattttaggatcggtaaaataaaatgagtgttcctatgagctgagggtgttggctttataggcaaaaaagggctgaggaaagcagaaacagagaacaaaaagcaaattggcctttttaaggggtactttatagagttcagacaaggggacttcctcgttattctgactctggctgaccagaattgcctgctttttggaaaactggtccatttcaaagtttggtttgattactgaacacttaacacaagtgactccgttctggttttggtctgttctgcctgggcccagggcaggagactgatcccctaaaatggcctcccatgcactttgtttaataagagatttccgacttcacttatgaaacccagcacttgcagcctttccctgacatccacactctgctggtgccctgattcttccaattccagggcccgagactgcccctcactctcccccctcttctcaagggaaacaaactggctttcctaatagttctaatttcccagagagggtgccctgctcacagaggaacaggctttgccatgactatgcagagctttttcatcctgatgatctcaaaatccccttctagaggggctctcagccttcactctgcagatcaagaagcccaccagtcctcacccacccgactcccaccttccctgcccctgggagccagctttacccagacgagttctgctcccagcctctaaaatgcagaacgggctgctgctttcaaagctatacttcgatggagtttcctatactagtgaaatctgttttaaatgaacatcaagaatagccttgaaagggaaaatatggactcgaatctacgccgactggcaccaagcggcatgtgagaaacgtgaggaaaaaaagtccagctcttcctgctcgtcagctgggccctcccccttccagaaagctaactgtatgtaaatgaatcccttcatctttttttagacccatagcagttgccgcgcttccaaatttaagtaatatatgctaaagttaacttagtagttaaactatgctttggagttaaactgcctgcattttaaatccaagacttaccacttattagtttttatgtttgttttgctttgttaattttttttaactctagatgagtctccatgttcttgcttaaaaaaaaaaaatattatttactcctgcatcggcaagaggagaaatcaatggatgccttcaaaacactcaggacaatttgtggtgcatagttaacacgcaatacttaacaaagttaatgctcaataattgtcaatgtcacattccccacgtccattacttttctgttagacaaacaacaacccccacgcccccttcccccaccaaaaaaacccagccccttctgagatttactggcgtttggggtaatgccatcgcagcagagctgggcactgtgagtcccacggaatcccgctctgtctgccatccctctctatccagcctgtggcttcatggcctgtactttcttttaactgaggttttcaggaaatcaaatagaagggatttctgtaggacgatggctccgaatgctgcttggatcttctagatgttcctcttttcacacacgggtagcgtctccctggctctctttgatgatccaaatgcatcactaacctatttccacagtgctggggacactgtaccaggaagctgcctctgagtcctcagtaccaacagagcagattatgttccatgttcttccaattggattcaggtccctaagctgaataccagcctgctggccctagagagtagagaagcctctctgcaccttgaatttttcactcatttcagagaaatccgtagcctcatagcagtaccttccccatccacctccccaatatactgcacacatttcattatctagttctttagctcttgtggcaaatagatattaaaatattaaatctgtctaagatatcttcttcataaaatattaagagaaaatgtctgtgttaacaatgttttaacatgaaatcataaacaaactgctgtaattgggtatttttcttctgaaggtcatatgcctccagaaaaatcaccctggcaagtgtgcaattcagaagagtaatcgcgccttaccttcagacactgtgcttttttgtgttcaaagagcattctttaaacattaattagttattccaccaaatatcctaggaggtgcggattaatatctgctaaacacagatggtgactcaaagggagagggaggctgaatcctgcctcacatcacacaacgaattggaggcaggactctttagtttaatccctgcgaatggactagcaataaatcacaaactggggccaaggaaccaaggagtatttattctaaatttcttatggatttcttctattcttggatttgtatgaaacccatagatgaacccctgagaagtaccttcatggatatgagtccactatcaatggaccccttaaatcagatagtcactgtcccaaggatctgcagctaggcactgttagaatgaagctctctcctcctgtctaacaagatgggaactgcttgcttttgagtccattttagctacaagtgatgttttatgaatgctgaacagtagaaaaaagagacgtgctggcatcttcctgggatcccaatacactaggactactacaggcaaaaagctcagaggttaactggctgacaaccctctttgctgacaccagccatgagtgagtgtctctcagtccctgccctgtgcttttcctaaggacttacgacgtccccatcgcataaaaccacttgcaaccattcccaataattgcagtgtgaaaagtgagctgatcagcatccgacttttatggccggctactaacccagccagcattttctaataatactttgcctttatatcccaggatcgcagagcaatttacgaagattaattagaagcgcctcagaactctccttcttggtggaggcaggggcggaggccatgagaggggagttaaatgagcctccctggagtgtgggaagtgagaattttaagtgagggctcctctggttcaagccgggactatatgtgagaataaaacgctgggtcccattagtagtcaacagagaaacaatctgtcatctgatattccaaaaggattcaattgggaggaagtaacgagcgtgtatttgtttattttttatttgaaaaatgatgtaaatacccaaatttgttactacccctggggtttcggcaagatgcccaagatatctgcaattttgtgagattacagcctgtgtcaatcaccctggacggagccatttcactctttgcccttcagtgcccacagcctgcagtctctggttcgccgagaggccgagggcgagctgggatccatgtgaccctttgatgtctgatgggacggaggctggccctctccgggcctccccctctcagtgctgcatcgggcctggtgctgccaggatccgcttggcaaagaatagggaacgatggtggagaaaggactctatcaggccattgaagaagcgcagctgctgagaggccaaggggggtgcagtgggggggaagctgcagtgacgttctgttttgttcttgcaaccaaggcacaaattaaggcaaaattagagactttctttgggctattggacggatgggaggaggaggaagacggggaagcagagcttttaaggacagcaatttgagaacatctgagacaaatctgtggctgattctttttttgtgtgaattagttagtgactttctttttggattccggaggggtttttccccccttcctttccctttttgcaccatgcacatgtaaatgtgattgagaattctttcgtcagatctgctgccttggcagccttcctgccagctggcctggctgggggaacccacgctggcggctgattgcgattgacaagtccgggtttggtgggaggaagttcaccatgggagacactcctcaggccctcctttggggcttggttcctgcaggaaaggagggtagaggggaccccccagcaggactgaactcctcctctctgcccgcagagggcgcccaagccaacaccaccatgttgtgtgaccacctagcaagcacagttgtgagtgcagacggtggctactctcgccggggcaccatctgatgcagaatcactgatgcccagagtcgagtagagtttgaaaggccatggagtttacatcctccttctctatctcatttcatgcctctatgtagggcatttcatcaaaacaccgagatagaagtaagtgtaaaaatcttgcctgccccaaatggttgtagtgtgtggtttgtcctattttttgcttctctgtttcagctcattttctctttgtgtcctttcctttttcccactgtggctccaggccatgttgatttgctagtgtttttccttaccatctttcctttcttctccctgcccacgcagattctcaccaatttgccagaacctaactcaaggcttccatccccacaagttctctctgctaactaaatgggattgtgtttacaactgttgagcacagaaacttacctgtcgtaactggtctctaaaagttcagtgaaattacacactgtcataggtaatctcgtgtgtgtgtatgagtgtgttagccttttaaaacaatattttagtttttcctttttttttggatacaggttctctctctgtcacccaggctagagtgcagtggtgcaatcacagttcattgaagcctcaacctcccaggctcaagcaatcctcccatctcagcctcccaagtagctgggaccacaggcatgcagagacaaagtcttactatgtagcctcatgtgatcctctcctccttgagtatgggttatgcttattctattattcttacaaatagaatacagccgtagtgatgggatgccacttccacaattaagttacaaaaagcccatggatttcctcttgggcaagctctctcactccctctgggattactcacccagggagccagctgccatgttgtgaggaagccctgtgcagagacccctaacctgttaatggtcatatgagtgagcttgaggcagatctgctcctcctcctaggcaagactttagatgagaccacagctctggcccacagactgactgtaaccttaggaggaaccctgagccagaggtacccagcaaagctctttccagatttttgaccccagaaactgtgagataataacagtttgttgttttaggctgctttgtttgttacacagcaacagataattaatacaatgggttttctataagactcttttctcctcttaaggtgctttaaagaaaaagacggtaggttttcaaaaagaaaatggacaagcttcagcatgaagagactgctttttaagtgttttcaactctttggaaagaacaatctatatcacttatctcacactaaccgtttctgaacctagagcaacttcagctattgaaagaggtatcaggcaatctactatatcaaattaattttagttaacttaaaaaataagtgatgctcaattgggaggctacggagcaagcagaagtactcagaaaagagaaggacactaaccagtactaactacacccagtcattactccacgtgacttgcattgtattatctcattttatttacccattcatgctctggagtgagttctgttattatctccattttacagataaggtagctaaggcacagaaagtttaattacatttcccaatgttgtatagctttgataggctgaggtgggcagatcacgaggtcaggagatcgagaccatcctggataacgtggtgaaaccccatctctactgaaaatacaaaacattagccaggcatggtggcaggtgcctatagtcctagctactcgggaggctgaggcaggagaatggcatgaacccaggaggtggagcttgcagtgagcagagatcgcaccactgcactctagcctgggagacggagcgagactctgtccaaaaaaaaaaaaataggccttacttcgaagtccatactcttgaccacaaattattctgccttaccatttcagacaaattcaaattattaaatacaatcccattttagaactcacaaatattggctaattgaaaaattgatgaataatatagatgtagaatgaaattgatactatattatatattttttaattttatcctatataggcaaagcttatttcaccagtcataacacacacctgcatgagtggaattgtatcttaaatgctccactgcacccagtccaggactctattctttcatgactgtgcatcagaaacaactggaggaagtaagtaagacaggggccagcacagagagaattacagtagttgacagcatgaaagaagaggtggtcagagatcaaaacaagttcagggctggtggaatacaaagtgagagagagaaaaaccaaatcatcatctttaggatgaggctgatgaggaagagtgacccatagctgagcatcaagtaagccaaggtcacagaaagacaactagtaataaagcatgtgtggaatgcttgctatgtgccaggcactgttctaaatgattgtcatgtattgtctcctttaattttacatcaccatatgaggtggttactaaaagcgtccccatttcacagatgaagaaaccgaggcacagattattgttaactcccagccacaattagcaaataaaagggttaagacacaatgagagatctgctgcaagctcactcaaatgactgttggcaggttttggtcccttgccaagcaggcgtctgcacagggcttcctcacaacatggcagctggccacccccagtgagcaacccaagagacagtgagagcttgccccagagcaaagccacaggctttgtataacttaattttgaaagtgacatcacattatttccaagatggcctgaaacaaaaatcctttctcttgaccactactgtaaattttcttggcaatgtagtttaagtcagtactagtgtgccatggttatgaagcaaatttgaattaaggaatggggatatttaccttttgctatattttatagatgctggatctgggtagggcaaggacacaaaaaccagtgatagccagagggatttgccatcttggtaacttgagtctacctagaaccaaaacagacaatcaaaagaaaaagcctggaataattatttagtcctgctataattttactgaacatcatcaaatttttaacacttgtaatcaacctactatggggaatggcatcaggctagttgggtatagaaaactacgtcagacaaggtctccatctgcttatgaagacattacatgtaaatattaactctgggcaatgtgtacttattgttaaatggggtaaagacattaactgcttgatgattctgagagaactcactgtgagctcatgtgctgtgatttgggttttgaacaagagaaagaaagagaaatggcattaacaggtgtggctcatgcaatgtgaaagtggagggtttatatgggagagtagtggagcctcacgctgcagaggactcatgcctgagcatgctaggggagaggttggtcttcgtcctgtaggttgtgggtggacactaaggtttgtgagaagacaggtggcatgataaattagtatttaagtgagattaacacagcagttatacaggaaaccatgccactcttaacctggaaaaatgtgtgtgtgtgtgtgtgtgtgtgtgtgtgtgtgtaggctctggttgtagtgggaaggcacgaggctagaagtcagaagacccagtttcttgtaaatatcttaccattaataatacacatgaatttaagcagggcttttttctcttccctgggacacacattcttcattataaagtgatgggattggagactctcctaaagtcctcccagcactagcattctggatttttcacactgccatccccctcaattagtgctgtaattaaaagctgactacacatccattctccatccagaaactgcagtccagggcttcccacaggagcttctgcagaggcaaaacaaccctgtcctcttctttcttacacatgatgatgaaaccaaagtgtttttctcccctctggcttatttaaccccaaatcattatttgtttttttgtatcttatgcctttcatgtcctaggtttgaaggtgatgtgtacatggcagagagacaccatcccaccccttcctcgtcacttttgttgaaaaatgttcctgcatccacacatacacacatgcgcacacacatgtgacaccaggtcactgcctggcctcactgctgaggagatgaaagcaaagtttccagggcacttattgtgcctcacctggtgtcccttagctggaggtgtgaggcttatatcaggtaatacagagtggagggctcgatccccatataagtagtacatttcagaaagtagcaaagaatatttcttctgcgctaaaacccaacaaagcagcaagggatacgctcttccccagccacatgccaggatcctcctaaatgcagatattcaccaaggaactggaacgttctcactccaaggctggaaaaatgactcccaggataatctgtggatgtaatttgtctttcagtctattttgatcaatctcttccctgcacccagccctcgaccttgctgctactgggaggctcattctcatggagacagggagaacctctgtcccctccccagtcaaaagtcatctgtgtcctttctgttttttagaaccaggactgtctgacagcagtgatgaccctgggggcttgtgtcatcattcaattcccatggtgggggagcaggtgggagcagagatacctgaagcacccagaagtgagtgggtttgcccaagagctgagtgttcattagactgaaaacagcaaacaggttgataccagaggagaagaaccaagcgacatgctggaagcccaaagtaacagcctcagagtttaagaacaggggcagaaaacagtgcaaagcagatcccagagatagggccagaggaagtgcactggactggtctctggtgtccaagcaaagtgccaagccaggtgtcccctgcacgacaagaggacaattggatggcttcttaatgtcccaatatcaggccactggcagcatttacaagttattataacaacaacattccttctttgaatgcttgctcacggccagacactgtgtaagggctttagaatactattaaaactcatctgcatggcaattgatgtgaaggctcttttctccatcttgtaggtgaggtaacgggcttcctaagagaacttatgggacttgtccaagctgtactgtataaatggccgatgtaaggtttaacccaggtctggccccaaatccaatgctcttaattactgaactttgctgtccccacacaactccaaagggatagcatgcgagtggatacccagtcatcatttgggcagtgctcagtggccctgaagtgaggtgggctggagacaggactgcactcccaggagaagggctccgggtaacctgaggtgacaggagcagcaagcaggctggatgaaccaaatgaaatccttgggcgtagtttcagtgcatccattctgggagagtcagcagcactgattcagccagagcttcaacttcttagggaaatttcttgccagctcagctgttaagactcaaattcctcacctcctcccagcccccaccgcagggttctctgctcgctgctctcatcttccccatgtcactcactcatcgcagaaccagaaggctcagccagcactgaaaggtccctggggaaaggggggccctcctggggggcccagatctgtaacaaatgacttcccgcagagacaagctgtgctgtgctcagaggccctgctggggagggacgaagcctcccgtgggcctgcttggtctatctgctgctgacagtccatggagctgagctgggggagatggaaggggggcacaccctggctccccactgggtttaggacccagcctgctgagattcgtcccatctgacaaccctgcacggagatgcatggattccctgcctaacaagactatctactggtgagctgagctgggtagttcccagctcaaatgagccaaggcttgagatttgctccccgaaagggtcactgataaagaaaaccccaactctgttgccttcagtgtgtctttcaccaggtagataggttctgtcagtcacatggaggaagcttgagagtgtggatggctcagccctgctcatcacagccactgggaaaatacccagagcgctaatgtgcccagcagcaggcaccagcatgaatgggaagggggcagttcattcacagctgaaatgcacttccctgtgtctaacctgaattcctcctgctgcaaggtaaacctcccttcgtttctgattttattagagaaacagttcttgtgttatgctctgggtaagaactactcagttgttggaagcccatcccacagcctcacctgctggaaatcagtcacctcttcttttcctccctttatacaaatagagcacttttgcccctggttggataatgatgttcctcataacaggttaagtcaatggttaagtcagtgatgaggggtaggaaactatttttattgggcatccactacgcactcaccccacttaatcctatttaacttagtatttgtcaaaggatcagaggaacagctctgactatgggaggcagaattactgggctctgctaaaaaatgtggtagagcatgctgggccttcaggcctagactggagtcctcacactgctactaactgagaagctttgagcatgtaacttcacctctctgagactcaatgtcctcgtctgcaaaatggctttgagcagcagctatagccttttaacctaagatccacgaagtctagcccagggcctggaaatcacacatgctcagtaatgacttgtttagtaaacagggcagtgcttgaatgattctggtacagatcattcaaataacatatttaaaatgccttacaaagcttggcatataataggtctttcaaaaaaaaaaaaaaaaagctagtttcttttgtcctgcagtagtgatgaaagccaaacaaccacgacctgaaatttcctctctcctattcacctccccaacacaaatacacacacacaccccaaacacacacacacacacacacacacacacacacacacacaccatagttcaaagttgacctttaggggctgtttcctcctccttccccaccactgcttgctccctctctctacctggtctccttgccagccctggcctgccacactccccaagctgcagtcccccaggtcccctctccctggcccctgcctccccacaatgctgggctcagagcagatgtgcagcagcctgccatcatctctgatgctgcccttccctgccaatctccggccacgtctggcagctggaattgcagttctccttgtttacaatgcattgtaattgcagacacaggctatgctgtcatttgtaattttctcttgtcctgttctccctgcacactcccttgcctaagtgtcaagcagttgcccttgtgagtggtactattggcaggaaatgtgctccaacatgcagcaaaaagcaaactattatttatttctcattctctccctctccactcaatagatgaaataggcaaagagcagtcctgtccctcctgcagcccccacccatccctacacctctccttccccagtgccattagttcctctaattgctaggtctcctctttcagtttggattttgcttcaggatgtctggagattacagggagaattgccttccctgctacagttgtctttcaacaagtgagggagcaattgcctggcttagctctcagcaggtggggtacgagcatcttctggagacaggctgctggctgggacttcccaacccatcgtgtcaggcaggggactgagcctcaccagggtccatgggctcaaggcaactctgcctgtggatctcaaacaagccaagtgtaaaggctcccctgccccgcccccctgccatagcatgcactgttctaagtggatgacacgttaccccatttattccccattagagctttgtaaaagccgttatcacctctgcttcatagatgagaaaactgaacccaagtacctagtcaaaggtcattcagctgatagtacgtgggcaaagctgagatttaaaattcactcaatctagttctaaaacctcttgtattttgttgtattttcttttgcgccacattctgtggcctcacgaggatcatgtttgtctgtgtctctggacatatcagtttctgcacttggcaggttgctttatgattatctgtttgtctgtcttctgtctgctactagactgtaagcactctgaaagcaaggcctgtatttcattttatttcccccttgtggtgcctgcatggtgcccagtggatcttttacatggatttgttaggatgaatgcattcagaggcaatatttggtcaggttgctgcccagagattgctaaattctgtgcaccagccttatatagtcttgtttctgaggaacatggatgattgtttgcctctaaatgcataaggatggttgttctagacaaagttagaagtcaggaaaactcagtatgtatctcatgacaattggattcaaggaaagtaatacacactaataggtctaattcatttgtcatttgtaataatttggcactggggaggacctgggaaagaatttatgctaagtcctgtagattttttgaaatccaatacaactgtcctgtaccaagaactgagtgcttgcattagttgagtatattaggagttggttctctttagctcctttcccccaaaatcttatgtaacattctcatattacatttataacaaaaggaaagtttaccaattttttttaagacagggtcttgctctgtcacccaggctggaatgcagtggtgagatttcagctcactgcaacctccgcctcccaagctcaagtgattctcccacctcagcctcccaagtagctgtgactacagtgcagaccaccgcgcccagctaaattaaaaaaaaaaaaattcttgagatggggtcttactatattgcccaggctgttctccaactacggggctcaagccgtcctcttacctcagcctcccagagtgctgggatttataggcatgagccaccatgcctgaaagtttactaatttaatattggtaacaattctccttctgatgaaaatattgcaacatcttgcagggaggtagaaggaaggaaatgagctctggcttgttcacctgcattgagacctagagaagttgacagggaggacaggagagtagggcgccatgtactctaaatattgcagtaatttctcctctcttcctcacatccctactcagccactcagtagccatgtgtctttaagccacttgctcaatctctctgggctctgttctcttacttataaaactggtctaaagatccatctgcttcataatattttgttggcttaagtcatataatgtatgcagaatgcttagcccagtgtctaatgcacctgcgtctttaattaagggggaattccacatcatagctgttttgccatttggggaggaaaggcagtgacttgaaggaggtgggatggctgtagctgagtctcagcatggggcttgctgctctgtctagggctcatccagccacagcaaaatcctaggcgtggtccaccagtgaatcacctgctggtgtctctaccctccctccacatcaccatgcgcctccaccagctgaaggcaacagaaagctttgatgagatccaattaggaataaagactgtacattcaagagggctgagcagttcacacggaggggaaaaaagaccctgaaattactgcaagtgctcagcttatgtgtcctcacaagctaaatagtgaagaaagatgtgtcatttagaaggactgactcctggtggaggtttgcctctcatcagctgagaaactattattttgcaaatgacatctccatcccaagcaattgtgtttcccccttattctaaaacacacataaataaatgatatttagagagctgctgactgtggagaaggcttgcctgagatgaaagaaaggaagcttgtatttgccggaacggactcttcacaaacctctgggatgggctgtgtacagatgaaggttttgggctgacagtgaaggcatatcaagcttctgtgcctcctattgggaactactgaggactttggaaaattagagggatttgcaggaaggcaagagtagcccaggaagacctcaaaagcaaaccttaaatacttcagagcagattcagggacagctagacagagaatggtttacttctgttgaacaaaaagcagtagaaagaagccaggggttcttgtcaacaggacataaaatacgggagcccatgcctggattgattgacatgctttgtttaggagctaggtcctattgcagtcaccatctgcatggcaggctggaagaatgccctgagtcctcatcaacatttgctaacagtgtgaccgggacagtgtttttcttgtttgtaacatgaagctaatacctcccttgtggctgaacctacctcacggtatttagctggaagacattctattaaactccgaggtgctgttgacctgacttttcattcccccttgatgataggaaaccttgatctggatgccttctagtatcttcagttcgatctaatgtctgtcttccttttgttgtcaaattcaagattattatttaagtgagagtctagggatcagcaaatatatttagtaaagagtgagacagtgaatattttaggctttggggaccataaggtctccactgcaaataccagactctggcatcacggcatcgtaggtaaacaaatggcagtggctgtgctccagtcaaatgtcatttacaaaagcaggtggccggcggaatctggcccaaggcccatggtctgcagacccctgacatactccatctgggttttcctcctctgccgacctcctcatgccatcccctctctagccttcctttctgctgagctaggcaggcagtggggacagcattcatttagggttcgggtaaatctgcgggagcagaaagcatgtctaaggacaccatggaggcccaagccctcgaaggtcttctacccgtgtccctgtctggagccctgtactccaacagacatccctggggctggaactcagactgattctcccagttaatgtgatactcagtgtattagtcagggttctctagagggacagaactaatggaatatatatacgtatatgagtttattaagtattaactcacacgatcacaaggtcccacaataggccatctgcaggctgaggagcaaagagagccaggccaagctccaaaactgaagaacttgggtctgatgttccagggcaggaagcatccagcacaggagaaagatggaggctgggaggctatcaggatctcttttcacattttcctgcctgcttgtattctagctttgctggcagctgattagatggtgcccatccagattaagggagggtctgcctttcccagcccactgactcaaatgttaatctcctttggcaacgccctcacacacacacccaggatcaatactttgtatcctttaatccaatcaagttgacactcagcgttaaccatcacactcaggttgggcccttaggaaacttaggggcccctttaatgccacgtgggaggttcaagctgtctgtggcacttgctctgtcttcctctgtctacccctttgtgtctgcttctgtctctctgtctctctctgtctctcctcccctttccccctcaccctgcctccacttgcgctgctttccccaccactttggcggggaagcacctgcagaggctgcactcagcaaattccagctgggaaacacaattccagcttcccacctcccctgtccacttcagattccgcattctgggccaaggtcctcttttatcctacccggacatatcaaggcctaaggcgcgcaagttcctgttcctatttctgctgcactgcactgccctctacccttacccctgggaaggagggacctttgagggcaatggtcctgtccctgagctttgtgctcagtgtctccacagaaatcaccccttttcaggtgccccagagtgagggggaggcaaaagcaaatggagagaacattcaattaaaatcttcaatttcctaccgtcggtctgtggatcaagggagtgcacatctcccagcaccaagcagctccttgttatctttattatctttgttaagccttattagctttaggaaaagttcacccagaagaattcaacagagtcctttttgcccagggtgaaaagaagtccatcaggagtccatagcccattagaaaatcccaaagagagaccagccacaaaactggaaacgtggccagtctgagtggcccaggccccagggacaggagccacaggcctccagcccttacgctgggatccaattggctctgctccttcaggctccatggaggagcagggcaaggggtcccctggggactgagctcagaccctgccctttccaggctggaaggggaggatacaagggagcagacaccagtgtatggggacacaactcacagtttatcagaggtgggagaattccccctgaaaatcacttttgcaagagatgcctcaagggaatattaaggctgggtcacattttcagaatttcagaaacttttccagaactgttttatcttctagttgtggtgccagatggtaatgttctggtaaatttccgtgttcccaagtggaagggtttggaaatgataaacaaaacaaggtaacaacaacaaatcccttgtactacacgcttgtctttctacactgtccttgttatgtagattctgttagtcaggattctgtgtggctttaacaaaacaaaggtctattgctcccacactgcacagagggagcacaggtcactgtgtgtgtcacatgtgtgcactcggggcggagagctcccccctccattagtcactggggtcccaggctgatgggaactccaccacctcaaaagctgcaccatccgaacactggcttccaccagcactacagcagcaaagagaactactactctcttctcatttgttttctttctttctttctttctttctttctttctttctttctttctttctttctttctttctttctttctttcttctttctttttttctttctttctttcttctttctttctttctttttctttctttcttctttctttctttcttctttctttctttctttctttcttccttccttccttccttccttccttcttccttccttccttccttccttccttccttccttccttccttccttctttcctttcagacagagtctcgctcttgtcacccaggtagagtgcaatggcacaatctcagctcacttcaacctctgcctcccaggttcaagcaactctcttgcctcagcctcccctagtagctgggattacaggcgtgtgccaccacgcctggctagtttttgtatttgtagtagagatggggtttcaccttgttggccaggctggtcttgaactcctgacctcaggtgatgcacccacctcagcctcccaaagttctgggattacaggcttgagccaccgcacctggcctgttttctcattttgatgcatcggcccgagtgtgccatgccctgtctacccagtctccagcagatgccctgtctacccagtctccggcagatgccctgtctacccagtctccggcagatgccctgtctacccagtctccggcagatgccctgtctacccagtctccggcagagctagtcacatggccctgtataaccctatataacctcaaggggacggaagggagaatctgtcggagtgcatggatatttgatgagcagtaaacggctctgccacatcgatctcagcaccttttagaccctgttaacagctgctttagagagaaacattttattggccatattatttatgtatccattcattcattctaaataattattgaatacctctgtgctaaatatacttccagtcattgaggtcataatggtgagcaggagagaacctgcccctccctcttatggctcacaacaatgaaatattgtcatgtgacagatgctgtgataggcaagggacagggcaccccagaagcacagaaaaagtttaagtgcctggagtatgtcaggaaaggcttcccagagaagtcaagtctgcagctgacccatgaagaatggttggggatttctcccagtcagacctagatctgtagcagaaaatgcaagtcaggaatcctgcctccctgggcagagttagaccctgcgggtgactcccttctggagtaaggacagttaaggagtagacaacaattgttataaacagagactaccttaggctgattgttttccttgccttctccaaaagagtacacatcacctctccgaggcggctcacctctggggtctgaagttgagccacgtggaggaacttgctcaatcggcttctgttatagatatgaaattattaataactgggatgtagctgtgcatgttcggaccctcctcccagcagccctctctggggatctggggtgagggttgtagggagacaccttgctgtttaataaataatagaagagattcataaagtgtctgggaagcacattcctcatgcagaaatgttacggaataacacaggatgaataatagaaaaggttattgaaaaattcataatttccaagtgccagtgaagggcagctcctgtgcagtctatttgcctgtagaaaagtgattaaaatatatattattgtcctgtctataggaaaatgtattattaagtggatactagcatgacatttggaaaatccatttcattccatttagcagcaatgggcttttggctgctgctttgtgcagcaggtttcacaagcattttaataagccttttaaaaaacaaaaaggggattttaattatggcccctgcctcccagccatgctattgctttgcatttaccgttcctctgccaaagaaattttaaaacatataatggggaatgtaaatatcctgcctacgtttagcaggtccactgccaagaaaggaacctgaccgctggccaggaggtacttatgggctgcaggaaggcagaatgggagataggtttgcctgtccagacacaacaagaagcaaagcctcagtgtaagaggcccataatccctgccaagccttacgtgtcactactcttctgtataaacattcactttttttttttccatatgaaaccaggagttacttttgaggtctaatgagaaacagttcctatttctgaataatgaattgagtcaggatcagggatcatctgatttgcccatctgcttcttggcaaaatgcatctcctcagcttgaagatcatatgcccagtactgctcggagctggattctgaatagattcaggtttggagtttgggatggggcacctctccatgccttgctcagtattcaaattctcctataagttgggtaagggccaggaggcaggatgggatctgagaggggtgggccacgccctttcaacctcaacctctgatttggcttggacagctctgtggtctgatggtctttcggggagcatacagatggacagtggtggcagcgaggtcaccccagcaggtggtgtaggaactgaggcagaaggagcatgatggaccagagcaccatcacagtcccagtctcttccctactaactgcataagtttggcagagtcatctgacctctctgggtctctctgcattttaataatgaacaaaacctctttgggttttaatgacaaaaatagagcaatttacatcacatcatagttttaaacattttgtttaagacacttttgaataattaaatcatttgttttaatgaaatctcatttggacgcagataaaattgtttctctagttgaagagggattagggactaaaatgctcccacctcaaacccccttccctctccttttttttttttaaggcagccccaggaagcctgtagttctgattccacagggattcctggagcacagtatgaaaaccaatgcatttaatgatacagaagttcccttctgactacaagtttctcaaattgaattgtggcctgtgtctgactcattgggatgagagagaatggcttttctgtcctcatttttactcctgtttatttagtcatcatatatttatccatttattcaacaaacatttactgagaactgcacatgtgttgcatttattctagaatactggagtgagcactgtctgaatatggatcatgagcaagacatactccttgttctctctgatgaagcaacaggcacctaaacagggtgccatatggttcaaaacacaggaaataagagttatattgggggcacaaacagattttttactagtaaaaattatgaattaggtttaaaaagaaactaaatatctctctagtttattttttaggccagtttattaattaaaagtacttatttcatccctgtatggatggcagattgctactcaggcaggctgtaccaggatggtgcctcagctgctgaaatactgaaatagttcatttgggttggtgaatagatcctgccaaaattccctgaatggcctttgctgttctgttaccttaaacccacctatctccaacattttcttgattcaactattctcctaaactgtgttagtaaggacaggggtttccatcgccatgcagtgcggtgttcagagcctggtctgggtggttaataccagtatcttaccacttattaaataagtcgaaaatatccttctcaaaaagtcggtctcctcaatgcttccttttgattccaagttcccagaagactggttgtacttaatattcactccccatagagttcccagtgttttcctggcttgacaatcagatagtgaaactaacatccctctttggcattttaaaattgcttcagattctctacactctccctaggtgatctcatttaaatggcatctttatgttaatgactctcaaatttatatcttcagcccaaacatctctgagttctagactcacacatccatctgtctacttgacatctccacttggacacctttcagaaagctcaaacttaacattctccaaattgagctccctttttatgtgatgctatatatctgtccccatcgattgtccctatgtcagtaaatgaaccgccattgactcaagagctcatgctaaatgcccaagagtcatccctgaagcttttctttcacttaccacctatatttaattgtcagcaagtcctgtcaattctacctgcaaaatatgtcttgtaatcaaactttcctcttcatctccactactgccatcttagttcaagacacaaatgtatttctatccagcaactaaccagtctttcaacttctactcttgatctggctcaattaatattccatacagcagcaattgtgatagtgtcactcctttgctcgatccttttaatcttcctccattgcaataaaatccaaacttcattccctagaccctaagccctgcacctgtgtcccatgcttgcctctccccactaactcggtgccatttatcattttattcatgctaaaccacgtgggtcctctccatccctccaacatacccacttcagagtcttgactttatcctctctctgcttgggccagtgcttctcaattataatgtgcatatgaataactgggaatcttattaatatgaaaaataccattccacagatttagggtatgggccaaaatttgcattcctaataagctctcaagtgatgctaacactgttggtccatggactatagtttgagtagcgtggcttccgttactgccatcccagatttattgcttggctacttcctcctcattttaaaaaatcagcttgattgagatataattcacacaacttgcaattcacaagcttaaattgtgaaatgtattggtgtttagtatattgacagagttgtgcacctataaccacagttaattctaaaacattttcaagaccccacgaggaaattatgtgcccattaacaagcactcttgacattgtcccgtacactcagcactgggcaaccgttaatctgctaatgttcccacagatttgcctattttggacattgaatatcaatggactcatataccatgtggtcttatgtgacttatttcttccacttagcatcgtttttcaaagttcatgtgtgttgtagcatgcaggtttcataccccatttctttttatggtcaaataatatcccattgtgtagatctgctacattttgtttatccattcatcatttaatagacatgtggattgtttttactttttacctgttataaataatgctgctttgaacatgcttgtacaagttttagtgtagacatatatttttatatctctttagtatttgactaggagtgggtcatatgataactgtgtttaaaatttataggaaccaccaaactgtttttcaaaatgtggacacaccatttgacagccacatcagcagtgtgtgagggttccaattcttcgaatcctcctcaatccttgttatgatctgtctttttttactataaccttcctcgtgggtgtgaagtggtatctcactgtggttttgatttgcatttccctaatgagtaatgatgcatattttcgtgtggttattggccatttgtatgtatttgtataactttggaggtaggactattcagatcctgtgaccattttttaaattgagtatttgccttattattgagttgtaagagttcttcatatatgtgggatactagtcctttattaactatattgtttgcaaatattttcttccactctgtagcttctttcacttcctcaatagtgtcttttgaatcataaaagttttaattttgatgagattcaattaatctaggttttcttttgtcactagtgcttttgttgtcatatctaagaagctatttcatagcacaaggttgcaaagatttacccatatatattcttctaaaaggttttttttttttttttaaatttagctattatgtcaaggtccatggtaaaatttaaggtctttttttctttcctttttttggggggagggggtgggggagtaagaatcccacttctttcctttgtatgtggatctccagttgtcctagcatcagtttttaacaaactattctttctcccattgaattttcttggcacacttgtcaaaaatcaattgatcatatattatatatgtgagggtttttttttctggactctattctatttcattggtctatatgtctgcctttatgtcaaaacccacactgttttgattactgtaggctactaatacgttttgaaatcaggaaatgtgaggcctccaactttgttcttatttttcaaaactattgtgtctattgtgggtttcttgatttccttattaattttaggatcatcttgtcaatttctgcaaaaaaaaaagccacattgagatttagataaggatcatggtgaatcaatcaatacatttagaagttcaacatctactcttccaatctatgttcacagaatgacttttcatttacttgggtcttttaaactttctttcagtaatgttttatagttttcagagtggaagttttgcaattattttgttaaaattatccctgagtactttactctttttgatgttgttgtaaatgaaatgattttcttgatttcacttttggattgttaattgctagtgtagaaaagtgtgatttatttttgtatatttattgtgtaccccgcacatttactgaatgtatttcttagttctaatactttcttagtggtttccttggaatcttctctgtatgggattatgtcatctgcagacagtgatagctttaattcttcctctccaatctggatgcattttatttatcttttttgcctaactgccagtgctatgctgaatgcaagtggcaagagtgaacatcctagtacagttcctaatcttacagggaacgttttactctctccccagtaagtatgatgttaaccctgggtggtttgtatgtgccctttatcagggtgaggacgtttctttctattcctagcttgttgagtgtttgtatcatttaaagtttgaaaaaaataaataaaggtgccctattcaatttgaagtcagcttcaacagttccttggtagacagccctatttctaactgcctggaagcctcttcttggactatctcacctgaggcagcttcaccaccccactctattaatcattgtttcaattctgtgctttctcttttatgttacttatttaaaattgtaaatattctttcactattcttttcttttttctttctctgcctctctgctcccaaggacagtgagggaccaagtttgtccagttcactgctgtgttttttgtttgtttgtttgtttttgagatagggtctgtctctgtcattcaggctggagtgcagtggtgccatcgcagttcactgtagcctcaacctccctggctaaagtgatttgcctacctcagccaccctggctcaagtgatttacccaccttcaggcacacaccaccatgctggtgtatttaaaaaaatttgttttgtagagataggctctcagcatgttgtgcaaactggtcccgaactcttggcctcaagcgatcctcctgtctaggcctcccaaagtgctgggattacaggtgtgagccaccacacctggctgacggctgtattttctgcatctaccactgttcctggaatataacagttgatcagtcaatgaatatttgttaaataactgaataaataagtgcattattgatgtcctaggtagatagatgctgagtgattcctcattaaatagatgcagaagagactgatggccagtgactggacagcgatgacagtaatgggtttggaaaatagtagaaaaacttttacgatggaggatttcagtggccaagacaaaacaaaataacacatgggaacttgggaactaactgcaaaaagtgttctgtcaagggggtgggcacactcacaccccacctgacatcaggatatgttgtgttcagtagtctgagttgttagcaagtacattttgtttctttgtagggcaacaaagagcaataatagctattaaactctccctggcagtctaaaatcctaggcaatgggccagtgtgctttagtgagttttcctaccccagcacaaaaaaaagaggccgtggtttaagagaccacatgtggctggctaaatagacctctaaatgtatctttatcatcagtttcatctcatttcttttaccaccctggagttaagtctgtccatttctcagcctcctcctcctgagcccccatcgtgatcatctgaattaaaatctgttatcggtttctgggtaatcccctttgatgccctgagtaccgcaggatctgtgttgctcaaacctagcatgcaagtgctgatagcttttgagcagctaaaatggctttgtgtatctcacacaaatgtctgcatcacttgcgaccagccaggagctggcaaaaaagacacaatttatggctggagattttatgaaatggtgagcaaaattgcctttgagggtgactcaggaggcctgaagctgctggccttcttgccattctttgttcactcccttagagagaagaggaatggggcccccatgcctctctgctgttttgcggttatagtcctccctgtgctgtgttttgtttgtttgtttttataataaatcttgcttcagtaggttatccttgggtcacatccgtggccaaagtagaaattaaaattttgcatgaacaagtaataacttcacctgggccaattaatcccaatcatgacatgacccataattgcaactttgtcatttttccatttctttcttccctcaatgatggcctctctctcctggggtaggggagtatgtatgaaagagcttggggtcagggttagcagagcctgcctgtaatgaacactagttgcaaaatgctagaccagctgtgtgaaccctccaacactcatgcttttgtctataaaacaaggtctctaattttcatgtagcatttattaaaagagaatgaaattgatgattgttgtacgtatttaccatcactctccatgctagattgtaaactggactgtagactccaggaaggcaggtgatgattctattttgttttctgtattgccaaaccttgtacgcacggtttgatcggtagacatttttggttttttgtgttttttttttgttttataattattattattatactttaagttctagggtacatgtgcacaacgtgcaggtttgttacatatgcatacgtgtgccatgttggtgtgctgcacccattaactcgtcatttacattaggtatatctcctaatgctatccctcccccaaccccacaacagtccccagtgtgtgatgttccccttcctgtgtccatgtgttctcattgttcaattcccacctatgagtgagaacatgcagtgtgtggttttttatccttgcgatagtttgctgagaatgatggtttccagcttcatccatgtccctgcaaaggacatgaactcatccttttttatggctgcatagtattccatggcgtatatgtgccacattttcttaatccagtctaccatcgttggacatttgggttacatttttgaatgagtgcatgagatgacttgataggaaagaactcagtgctcaggctgtcatagaataggtgttcaggaaatcatccttcctttaccagtttgaatgtttctcagatgcttcatatcaactgacagtttagaaaaacctcaattaagaaagaaagttcttttttttggagctttgtccatgtgaggatgtcccatcatttcttatggtgacaggccctgacagcctcatgcctcctgaccccagaggctgtgccttaatcagatgtgcatgaagccacggccctcgattctaggccttgctcctgggaacatgtccattcccgcctttcttttcagcctatcaattattcctcgctctttttgtctttctctctctcccttttttacatcccctctctctctttcccgttttccctgtctctattgctctctctctttaaatgtgccctgtttgtagagctttctctgatattttctggcccagttggttcatttattaaagataagatatcttcagggacgctggattcaatggtgtcctacagtgagttgacgatggagtcatgatgaaatatcaaacttggaagctcgaccctataggctttcctgtgtttatgctactgacagtagatgcaaatagtagttaaaataataatgtaaaatgttttcttaaacaccaggggagctcatttatggaaataggcctattcgcatgcccaacagttaaaaataacaaaactgggggtgcatgggtcaggatgtggacaggaaacatccaccacagttttctctgaacctcgggaggctgagctgggcgaaggcgtgggccctgcacggctctctgcttctgtgctctggatgggagagatctgactgccagggttcctttccctgaggcacgcaggcactaccttcctgacaggtttttctcagccacactgagagcttaggcctgggttgcttgagatggtgtgctgtttgcattgttacgcctggcttaatgataaagcttagaagtgtggtcaaagtcctattattaaagtcatttaaacccagacaggactgagtctgagagaatgcactgcagggaagcaccttgcccacactcagtagtggaagctgtgacctaagccttctccatctcttatttcaatttccccatgtctgctttcatgctgtgtggtttcctgactgtgactcagtctgggtttccatcgcaggcttggacttaatcccgagaagatcgaagacgtcttgatggggcaaggcattggaaaagcagactgtggtttgcatttgagctggatttatctctggtgctttttgtatgagtaacaatgccaagccctgggtctgacccttaatagattcttatttgcagaatgtgtaaataactactctcctttattcactcctcttgaagagccaaacatgcttctgtcttcaacccttctacccagtccctagttcacttaatataaatgctaattaggatgtgggtttaaggtcactcttccctctcagggagaagggaccaaacacaggctttccatctgcagaggttggcagagctcaggttacctgtttttcttttgcttctaccccttcatctagtaaagaaggtgggtatccctgctctttgtaacaggagaaacacatttctttgtttgagtcatttgcacagttctggcaaaatcaccctagcagcatcttgtggaaaacaaaaatgcaaaggcacagatgactccagcttcccacagtgggtagccctaaataggacacttgccaatggcaccaaaacaatcgttaaactgtccaacaacgagctgggtaaactgagagaaaataaacctagttcaagcaaagaaacaaaactagggactccagcaagggcggagtaaatggagtgcctcctccacagggcaggatgctgcaagcccctcatgggtccagaatcaaaggctttggattaaaccatggcaggaaacccagctctttccacccaaaacaactgctgaaccagaagaggaagaaagaaacccattaaaaactttgttcctggggcttttattggggcttttggcccacggaattcattagtaaataagtgcagaattcttctcctatgtagaatagtgggctcaacccagctgggcaggcgagatccacagtttcatttagaagaagactgttgttcagaaagctctgcaccaggagcaaggagagcttggttttaacacaagcttacacaatggggccaaggagcagagtagatgataacctgacttagggtttaagtgaggaagcattcaggagaagctccagcccctgagaagtgttctaggaggctgtggagcacccgcagatcgatagcatctgggcaggcagggggtaagaccacactgggaatggaggagggcgtgagtagtagcatgagatgaggatgcttgagttggtgggagtgaaacatatgtggggatatgctatgaaatgaacgctgaggatcctaaatgctggaccaaggagtttagacttgatcctgacatcagtggagaaatgctgaaaggattttagagcagaagagtgaaatgaaagtggcatttaagaaaaattgatctggtgaaagcgtgcagaatcgattggattggaggcattagaggtggccagacaaagagatgctgatgtaaataatgggatgggagctgaggggaacctggactgaggtgtttataagaatgggaaagaggcgtggaggagggaagcagttcaacatccatctctgagtgtaggaagaggcatcggggaccaaggaagctgaagtgacgctttgggtttttagcctttgcacctgaggagggaaaaggtggaaatatggtcaaaaaaatgtgagtcaggaagaggagctggctttaggaggatgatgaatgtggcttttcttaaacttgttaagtatgaggtaatagcacgatatcctaggataggaaggtagagaaactcaattagaacttgagcttcaaataacaccttggatctgtgcagaactaattcctggctcctgcatgtatgatagcattttataatcacacgctacacgctgcatatgaacatgaatgtggtaattacaggataaatcctccggctctctgcctctccggctcctctgtgtggaatcagattgctctgggactgagagaacaatagatcaaaggggaatccacttacataaagaaggaggaaaagcacaaggaagaaagacaaaagatttttaattcaaaaggagctgaggacctaaacacacatcactcctattgctaatagcaaggaactgcagctagaagcagaacggaactaatgagaaagtagaggcattaggaaggaagacctcgtgctggaactgggctgcaattcggtggtggaacagaagttgccagagctaatgtaatgtgtgaaacatgtcaaccaaggtgggaaagaccagactttccccacacagagctatggtgatttacttacatatctgtgttcgtgaacacatgtttctgaagatggtcagaagtagattctgaagattaattgctaactgtggcagccatccttcaaggatgacttcagggaccctcacctcctggtacacacacccttggatagctcctttccacagtctgtgaataatagaaaatggcagaggtgatggcatgtgacttcagagaccaggtcatagacagtattatcacatttgccaccacatcctaaggggaaagccagccaccacatcctaaggacatttgagcagctccttagagaagccctcagtcatcaccagcactgatttgccagccatgtacatgggccaccttggaagtggatccacccacagcagtcaaacccctgcctgcaaccccagtctacctctgacttcaacctcataagagaccctgaagcagaactgctcagccaggctgctgctgaatgcctgccccacagaaactgtgagcagtagcaaagtgtcatggtagcttaggctatggcctgctttgttatacagcaacagataactaatacgctagttccacaaaatgtactagaactgtggagagtgctcctcgcaatttttattgtgaagaatatttgggctgctgtgatgcgtcaccaatctattgaaatgtatgaataaaatgttttcagccaaagtctatccaaaagggtgcaaagcctcatggagggaagcaaagctcagaaaaagaaatggatgcatattagatgtcaaacatgtgcttattgagttaaattgaattgaaattgcagacagttacagatgaagcactttacattgttacctcacatgtttatcgaatgctgaactactgacgacagcgtgctagtggaaggcttctgtggttaaacttagcacagtggaacaccagttggcccagccacaccagttggcagatgtgctgcagggccccactaagagcagcctctctggctgagtctctgggcactgaacagcaggaagcctgtccccaaatccctacccgggtccctctgtggcctggttgtcatcgctccctctgcctctgctgcaggagctggcagttttgtaatagtcacagtgcagcctcccctcatgtaaagcaggtggaattatccatagctgctaccatttgaggcagaagcttagttccctggggccaggcacatttgaggacactcatgtgtgctgcacttccgtgtgcctccctggtctgtcctcctcattcaagcttctcttcctccattcccacttcccttacagaactttttccttttccatctagcacacttcttgcaggaaagcatgggcagggagcttttccctggtggctggccatcaaccctcaggtctgggcactctcctcgccctggaagctcataggccactccgacaagcagaccctgatgccctccccacccatcccactgaccagggacacccgcctgacttcgtagtttgcccaagcctgggcccccgcccaagttctctgaaatcgtattttacagttattccaaagcccccatggtcctcggtgaggagcacatttttcttccagctggtgcaatgaggaggtttcagcccccatcctcaggtggctcctggggacaagctgtcccctcctttctgatattgattcccaaatgccagacagaggagggaatctatgataagacgggcgcttctttcaaacctagtaaatattataaatctactatgactcaagttcaaccgtctcattttaaaatgtgactaattccagcttctgctggtgtgccttgctgaagagccaggcgcgatgctgagaacagggcgtgtgtggtcacctttcatccttacccactactgagaggtggaaccagctctcccggttcacaggagacgtggagactccgagaagttaagtcactagcccaaagccacacagcccgtaagatctgagacctttttatgccccactctcctaaagctggcgggagcctgggaacaccacgtacctgccttgctttggtggctgaggaaacagaggaaccctggtctctggttcctcactcctggcttcctcctactcccggctgcctccctttgtctgtgaaattctctttctacacgcagacatgcaccatgtttttccctccctgctctgcagaaaacctcaaatagtggtgtcatagaaggacttatgagtagcctctcaatacctgggtgcaccatggggcggagatgcccaggacttgcaaggttcactgagatctggggcgatgggctaccgacagccttgaactagaagcacagactttaaggagctgcctccctcagcgggagctcccttctcatgatgcagaaaacaggcctctaaagagggaccgtgagcgcagtggacagggctctacttctaggatcatccctgtgtgacctgaggagggaagtggttcccataaatgccccatgcccagaagggccgtgcagagttcggaaggaatcctgccccatgctccatggagacccaccctggctgcagctctgttattagcaattacagctctacgaaggaaaataaacactttccccaaaatgggtctgttctttttgttttaagctcttattcttcccaaaggggacaaaagtgctgatgatctgcaaagctgtgaggggactagacaggagggcagtgacccagagaaagcccatggggcaggggtgcaggattattccttaaggccagagctagtctgcagctcttctgtgccatttggcccagttttctggggccagctctgggtgactttttctctgccatcgtcactgctttgtcagttcttgttcaaaggtcccctgagttgtacaactgccattgtctgtctcagacagttcttacactctcaggtctcagagcacataaaactgttgcagctgcatattgtccatcaagactatgaaattggaaaacatgcttggatttagaatgtgttcagttgaaagtgagacactggagatgcctccctcacgtgaccagcagcactggccctgcccgcctggctttgattccagctgtttctctcacattctctggctggctcgccaagctcatgccccctccattctgccctcgcctcctcccacccttgacctttgtggtgtggtagaagcagatggtcttgcagccagacagaggtttttccccttgaagttgctctccatcccaaaaagctggtgagcagatacatttctagacaaagcaatattctatcttaatcaaggcagcacacacaatggcgaaacacttggactgagaaattgggctctgagagacctgggtgctagttctgtctcttttgaacataacacagtctgggactacagtccagttactgggtctctcagcctcagattcctctgtggcaatatagagatgtcacagtatctgcatcatggggttggcaggcgaagtgaaggggccttcaaagtttagcactgtgcgtggctcatagcaagttctctctctctctctctcatttttttttatttagacggagtctctctcttgtcacccaggctggagtgcagtggtgcaatctcggttcactgaaacctctgcctcccaggttcaaacaattatcctgtcttagcctcttgagtagctgggattacaggcacccaccacaatgcctggctaatttttttgtaattttattggagagatgggatttgatcttgttggccaggctggtctcaaactcctgacctcaagtgatccaccctcctcagcctcccgaagtgctgggatcacaggcgtgagccaccgcacccggccgtagcaagttcttaatgaacaggggcctctgttgtgttatgggatgttcaggacatggctcccgtcagctcccagctcccagacagcagggatttttgtaccatgattattttgtgaaccctctggcccctaaggctgtgctgagcctgtgcatcccagggagcttactgagtcactgtggaatctgctgctgaatggacagcccatggttgaggccagtgaacacggcaggacctctgcttcccttgggcagcggctggggcgtagcctagagtccttcccagagccgaatgtaagaagcaaggctaagcgtggctgggtgagtatattcagcatgttagctgctgcttcacatccttgcgtggccctcaagagaatcctcaggacacgctatccagggctctgtgctgttctcagctgatgcctctgttcctgcaattgcatggactctttcatcaagaggtagcaaatcatctacaaataagggttacaggctctgtacaggggacagagatgaaggacaaattgcatcctctgcgcagcactggggagactgcacctgtcccgtgccacctcccagggcaggtccctttctccttcctcacccaagacaacctgctcaacatccctatcacccagaaatggggcttgggagttggaggacagaggaaaaagaaacatttatcaaactggagagtgggaaatgaccgcggacggaggcaagggagagagccaggcctccacaaagcagagaggaagcaatttgacaacgaggtgaaaattgccactgctgattctcctgacactctgagctttacccatgggcccagggaaatctgtcactggctcagggaaacgtctgcaaggaactggtaatagtttagcaatggcctagtgacttagaatgagatggaggctgcggcggcaccaggggacatacctcctgtttttaacccaagatgatgagatacggagacagttctcttccccacccggctcctctggtgactgagccaatcagctcaaaaagccacagggacagagagaacatgcggtcaggaggaaactcagattgagacagggttttacaagcacactgtcttgagggggtgtgtgtgtgtgtgtgtgtgtgtgtgtgtgtgttgtttggtttggttttcctacagctgttttaatgaatgcaccttcccttcatgcagccctcctcctctgtagcatatctctgctttatggcaaatgggttttgattctgaagcaaattgaccttgaaataagttccaggatttgagttcttacaccccagatgctgggtttggaatgcagactgctcaatcagcagattccagctccaactcctgcatctggagggggacactgcattttgtcaaactattaggcaaagtcagaattgtggggctggacgctgcgaggctggggcaggcagaccctaggtgtgctgccgatgtcagggttccctcggtccttctctctgatggcgtgtgtgtactcctgtgtaactgaggccgcttgggaatgttgcagagagtgctgagagtggagggctgcaagaatctagggtgacgtggctacagagctctgatcacaaacccatcatgtcacagggaaactgagtacactttgcggaaagaaaacgtgtgcttcgtacgtgcatatgtttaagaagatcatcttcatcttagttttgctgagttcccgattctactgcgattgtgattcagggattttgttgtaacagacccaaaaacagcaagtatttattgagcatctactgtgtgcctggccatggagcaactatctttaaagtgaaagtatgagctgagctgagtcccctcgtgactgcctgtgctcagcatgaggcaagcgtgtgctcaaggctggtgtctgagtgctgagcagtatgggtgatggatttaatttaaaggagattctggtggctttaatgtgtccaagcgttatgttgttctgagctgaaagatgaatggaactggcaatataggggctcgtgtgaacagaactaaaatgtcctccaccaattttcagcttccacaacacaaaggattgttgaaactcagttctttcccctggggtttttgtttttgaggctgaagcaatgaaacagatcactgcaaagacaaccagaagccttttgtagatgataggggtgaatctagaccagaaggcagataggcagggggttgggagggcgagccacccagtgtgccgtctgaccttgagatggacagggagggggctgtcttagaagaaccagagcctctgggccagcgccgggctactctgatgtggcctgggctacagcctttgggatgagagccaggcagagaaataggtagggagttggtgttaaaaaagcaatcccagaaaggcttgaggctgctcatttgcaagctgtgcatttcttttccagtaagggagacctttgggagtgatttttacagaagaagcagttaggtataactctggttacagcagaaattcagcacatccaagacctcaaaaggcctccagaggttgcttagtgcagccccttcccccaagcaggtctgcgcctacagccattccagaacaatagtgtttcattttaaatatttctcaggaagggtatttcgtaaactccctgatgcactggtaccaaaacaaagcctagcagaaaaagaaccaaattttctctggactatggccaagtgcaatccaagatggatacagatgttgcaaaagcagccagttagtcagcaaatgtgccaatatacctcttctctgtgccctctggtgacatgctatccgaattaaattagttcagtattgcttggggctcctatttgactctgattcattccggtgggagcagcgttttaagttcaaggaagagaggtgggcagaagactttgctcccagtaacatcaggatgtgagcccactttaaaacctcccctatgctcagataagatggaaattgagcttaaatgctagttacacacgttctataattgtcttgcattttagcaaattcagggataagtaagtattgaaaagccaacgtgttctggaagcagaaggcttagaacatgttctatgcatggatagacaggaacatgttccgatgagctagaagttgtgtgcagtagaagactgcccatgtgtatccatcaccaactatttacgccaccaatgcaagatggtattcctgaagaaatgagagtgaagacatagaaaatcataattgtctggcatgttttcagagcatatgtagagtgattaggtaggacaaaaatcctgtgaataaaaatatgatgagaatggaagaactagtgctaggctcgagaggtatgcgaaaacaaacaacaacaatagcaacaaaaagatgtgaagagctctgcctttggagggcgtagctggagtttctgagatgcagtagcactccacagcgaataagcccatgagagaatgcacagacatacagtctgacgacaagggaagcatgctgggcattgagtggcaaagcccgaataaggaaagtggaggcagtcaaatggaaacctgccatggttatcaaggaagtttcctttctccttgcaccataaaataatagggggaggcagccaagacttgccagtctcccaaatgctcccactctaactttatgtaaaacacttgacacagtcagaaaaacctggaacacatatatctctagtaacactgaggctaggacacacaccaaaggctgtgggagtacagaggatgagcaactcttttgcagtagctgaaggtcaggaaggaaaagcagaaagaaagaaattgaaagtagatatggatttagtactacgttgcagcattttgtctttaaaaccatagtttatcagactaaaatggtggggcattggcaacagacagaacacactcaagaaagagggaagaaagaacacaattggccacaaagtgaaagagtcaagacgcaaatttttcatgaaaaggagagatagagccaaatggaattaacattagattttatgaagagcagcagacgtggtgtagaaaaaatgtaacagataagtcacccagtaaaatagcaaataaggatatgggggtaacatctaccgctaaacatcttctttttttttttttttccttgctctgtcacccaggctggagtgcagtagcatgatcttggctcactgcaacctctgcctcgtgggttcaagtgattctcctgcctcagcctcctgagtagctgggattacaggcacacactaccaagcccagctaatttttgtatttttagtagagatggggtttcaccatgttggccaggatggtcttgatctcctgaccttatgatctgcctgcctcagcctcccaaagtgttgggattataggcatgagccactgcacttggcaccactgaacatctcatatactaaagcacacaataaaaatagccagtaaaggtactacgagactatatccaagagggcaagttctatgactctaagtttgaaataaagttttctttacagacattttccctgatttctaagcctcttcagctgcaccaagggtctcctcatgtctacagctaaaaccattttcaagtcatcatcttctttaaaatccctttcctggtcttcctacctcttcccatctcccttcctattcactactcatgaggcagaatgatccttttcaaacataattagaccacatcactccccacttatatctcccagtgacttctcattccatgtagaaaacaattcaaatgccccatctggctcacaaatcatcccacatcctggctggcccatgatcccattcctgtcacctccccttgctcactcagccccagctacatgggcttcttgctgtccctcaaacacaccaggcataatcctgcctcagggccttggcacctgctgttccctctgcctgaaatgctcttgcccctgaaatacatatgggctgctcgctgacttcactcaagtctatgctcccacgctatttcctaatggagtgggtccaccacctgcaggcctgcactgtccttcttcataacacgtagtgctctgggattgtagatcacatatctgcttgttattgtctattatctgtcacttaggctaatatgtactttctatgatagcagcagttttgtctgtcggtccactaatatattctccatgcctagaagagtacttggcacatagtagatgtccaatagctacttcttaaatgaatgaatgaatgaatcataacgataaattacgctaaccggtgcagcactagccactaactaatgtgatgctgccagacacaaagcttgtaattgtatgttgaaagaaaacagaaacctgaatgatgtagcatgtgagagcaggaagagaattcagggttaattgagctcactccctgttaaggtaatgaaactcaaaatgtctaataatttattaatgttcacataactagtaaatggtggcccaggtattaatttacgtctgtgtattcactggccagagtcttgcttgtttacactacccagctaggtatttatcccctaaaaactaggattctaatagaaaaagccaaatgtactaagttgacaataatttaagaacaggtgtaaagcatcactttttttgccaagtggtcaggagatgaagaggggagaggagagatgttcctgggggcatctccggagaaagctttgtctgtatgcttctaaatgacggtcatggccaaatacaagggcaagtgtgctgtctgtctctaaatgcagaccacacatcaagtgccaccctgtcaaagaggaagctacaggcctggattagtggtgtgtgcctataatcccagcaccttgggaggctgagacaggagaattgcttgagtccaggagttcaagaccaggctgggcaacatagtaacaccctatctttacaaaaaaaaaaaaaaaaaaaaaaaaagttttctttaattagctgagcatggtggcctgtgcctgtagtcccagctactgaagaggctgaggtggaatgatggcttgagtctgggaggttgaggctgcagtaagctgtgattataccactgcattccagcctgggcaacagagcaagacctcaactcaaagaaaaaaaaaaaaaaaaaaggaagctacagacaagtggggaaagaattatttctatgtggaagctttcgagaaacagggccaatatttgggggcctagataacaaagaaccatatagaatcaggggcaaaatgtcctttcagtctctctttggaagtctctcctttgggaaagtacatgagccaggaaagccacattcctgagaagggtcccgtggctgtggtccaggcaggcccacactggagaaatgtgtgggcagaagacattagcaaagggcctgagtgggaggatgggggggaccatccacaggaagccaaactattccatggggaaaatggaacagaagataaagttcctgtaattaggtaaaagtgctaaaaagccagcaagtttcatctattaaatataatgtgacctgacgggtacccgtgagctggtaagaacagaggaaagatgtataaaaataaaataggtgaatatatgtttcatttacttcttagtttgcataatcataagtaaacaagcatgaaagtgatgcctcgggccccgggccatgtccatcctcggctccacagttcagggacagccgctcatttgtatgctccgtgtcgccaagattcaacagcatttggggaaagaatgaacaaataatttatttcttacttgaaaagttaattcatttctattaatatttcatttattacctctaaattgaccagattattaaattaaccactatttggtagccaaaattttgctgtacacacagaatataaattgatgatatctactccgtgaccacacagttaagaaagcactgaagtcaaaggaagaaaaacggcgtaaatctgcttcagttctgcccctaggccactgttttcggtcatgttctgttgcaggcaggatgagacagtagagatgtgtcctgatgttcccctccctgacaagagcaccccagcaactctcctgttggcccttgagctaacaagctgagcaatcgcaccgaccctccaggagtgctccttgggtggcattcatctgccaacatcatgattttgcatttgtcactaacacactggttgccttccgtccaggtgctctcattggtacactagacttcaaattggcgttctcctgaataaaacagaaaaagagaaagaggaagaggaagggaaatagctctgaagaaacaacttatctcaaacgatctcagaaactcacctgcttaggagacccacagcaatcatggggtgcccatagacacaggggcttctctataccggagttttactttataagcccaccatgcagtggagagactaccttaagtggcagtgtgggtgtgaagtttgcaatcagactatcaaggctgacttttgattctcttgtgtgatcgctgggtgaccttgagaaagtcactttccttctctgggcctgagccccttccttggcagcatggatggacatcctacctcccaggactgttttgagaatccagtggaaatatatgtgagaaagatttgcacccagtaaaaatcgtatacaaatatgagatatcattagaatgagttccttttgattattccataactaaagcccttggctcaagtccgagacagatgccatgctgtccaccgaattccattttataccaaatcatgttagagagtccaaagtatttccattttaaaatcccatcttcggctgcttgcatgtttaaatgaaaattcatttggatagcagcatgctaggagcaagacagcagtaactaaataaacaactaatcagcgatgggttaggcctctctatagggacgcggatggaggacacttgcagtgcgcctgcctggagtgacccccgcagatggttttgggctccagtgtgtccccctctgggccaggcccactctccctcccttgggaggaagcacacagcccaatttaagcacccaatgtgtaggctgggaatggaaaggagataatggtgtgtgtttgctttgttaacttatccattttgtatcctgcttttcttccactgttagccaaggaaaaacctcggggctgccgtagctgggcaggaggaaatgaagggcctaccctggccgctccgaccttgagtctcctcatccactctcacccacaaaggcagttgctctgaccgaggtcactaaaggctcttaattctttctgtgaaagacagtgatggagccatgtcagggggtttttgccccagtcatttcctggggcaccttgtactctgtgcagaggctgtgtcctcacatttgtgattgaaggcacaggcagacaatagggttcagattccattttcttggctcataagggcgattctctggcaggtcccttagtgcggtccggcctgggtatcctgtccctctgcgtcctgcccttattcaaggaccagcgtttccagcacatcattcagtggcaacatggcatcgtgtctctgcatttagagggccactgatcagcactgtgatctcaggcagctgatctcagatcatggcagcacagtggtctcattagcgtcctcatctgtagaacgggcacagcactatctactgcacagagcagtcctaaatattaattgtggtcctgcaggtacagagctaagcaagtgtctgtggcctcataagccagggacatcacaggaggtcttcccagtggctcccacccagagctcatcctgctacaagttctgagccattggagagctccttctattatttgctgattcattagggcctgcctttgacagtaggactcatggccactcatagtgttgtattactcatagcacttaacattttactaagcataggatggacatttaacaaatgattgttttgtgctttgtgaagtcagatgtgcccatccacgctaatcacggaggaatccacagcctgtgcacagggcgagtccctctatctttggttcatgcttcagtttgctggagccattcattcattctttcctggagtatgtctcacatgcctaccgcatgccaggaatccaggaggtggtgatgatcaggcagccaggatttctgtctccacagagcatacagtttagttggctgcattcatatacctaaagcatttttgctccctcaaaaaagaaattatcaatgattccaagtacttaaaaatcaccataacctgaaaagcttgctgggttgtaagtaacaacctcaccttattctgtttatctgtcactgagctggaaacagttacaaagtaggatgtgctacactgcctattgagtttattttgtcttttatacagaaatcaaccttgtagaggaaaccacatcatttaaaaaaatactcaagctctattttaagggtgtaaagtgatcacattttctggagatgaatgtgtccctttgaaagcacctgactacatcagaggccgaaatgcagatgtggggggccaccctgataaggtccccccatgatggtctttatggacccctctgagcaaggggagactctcttgttccatttctgaaaagtggcagaggaaggaacaggtgccttcgggattcagagttaatcaaatccacaaaaggcaatccagtcgcttcttgggattaatagaaattagtccactggagacttcttagagaaagaaaagcagagagagagacaaagacagagagacagacagacacagagagagactgaaaagatgaaggagggaggatagaagaaaggcttcatttttttttttcagataacgttccccaataacatacatatagcctggtgcacagaatgtcagctcaatgaattgtcacaaactaaacacactcaaataaccagcatgccaataaagacacagaatgaagcatgcaggaatcaccaggccctgttgtgctcacagctgccctcttccacaggttaacctccaacttgatgccagcctccctagataagtgtgcctgctttacaactcacatgagtgagatcacagagattcttctcctctgtggctggcttcctctgttccacatgtgtttgtgagatccaagcatgttgtggcctatatttgtggttgtcactctcattgctgtgtagtgttccattgtgtgaatatgctacacattattttatgtactgtactttcgaagggcatctgggtagtttgcagcttttatctgtggcacgtggctacagtgcacatttttgtacaaggcttttttttgtgaatatatgcccttatttttataagggatgagataaattcaatttatttattaaaataaatttaattttaagaatccaagtaactttatagatgttgaaattattacataaagagtcatagaagagaagtcttcaatgttcaaacacacatggagaatatacctattaaatagtactgaggaagatatttaagtgtactgagacacttcttcaaatatctctttgtagtgattagtaactgctgtagtgttaataattactaatactacaaacgtatatgatatacgtaattactaatatacaaacgtatattcattattataaatgctaatgcttggttgtttgggtaaagagttctattttgtccctaagatgagtgaggacctgtgtgaaatacatagtagttgctgattcacacttatagggaagttgtctcttcttccaaagggtggcagcttacctcagttgcaggcaaaggattcctcaataggagatgatcagctttaaaatactggtcttgcaactcctcacgtgtaaagcaacaacaaacattgcaaaccaggacgtgatgggcaaaaggggaaaacaggcattaatttgaagacatttacactcactcaaatgattgaactggaacccaagaatctgcaaggaggcgaaggctcctagacgatctctacttattctccatctgtgacctgcagctagacttcttccatggcccagttctccccaacaaaacgattgccatcctctgcttcttaatgtgccaagaaagcaaaaactaactaaatgaatgagtaaagaaaaagagcccagcccttgttccccgaattgcttcctccacctgctcctaatagggaagccaccttatgaattacagctgcctgggcaaagctctgaggaacctgtaggctatctcacttccctttcacccgctgtagggtaatgagatgcgaggatctggcgtgtttgacaagctggttgctccagcgggctcaggcgctggaatgggagattaattgatgctaaaagacacagtttgatgtggcaatgaaatttcgattataataatctctaattatcttgtacctcgagtgccctggctctcccaggtgtttcttcttggttggaaattgctatttgtgcatgaataaagcaggcggcttttatttatttattttttttgtgggtttgggggtatggggaaggacgtaaataggagtggaaaaagaatatacactgccacgtttgagagcagaggaatgtctgaggtagagtgtctctgaggaaagtatagcattcgaggaaagtaaagttcacattactttatagcaaatgttactaagacaagataaaggcaaacgtaataaagatagtagactaaactggaattcttatatcttgactattgatggccaggcaaggacctccatgactagattataccatctctaagactattggagaaaaagggtcaaagacaaaattaaacctcatctgggcgggcaaggtggctcatgcctataatcccagcattttgggaggctgaggaaggtggatcgcttgagtccaggagtttgagaccagctaggcaacatacttacaccccatctctacaaaaaataaaaaattaacacaggcatgctggtgcatgcctgtggtcccacctaccctggatgctgaggtaggaggattacttgaccccaggaggtcaaggctgcagtgagctatgattgtaccactgcattccagcttggacgacagagtaagactctgtcttaacaaatgtatatataaagcctcatctttccaggtgccattaggagtcctctttataatagggattccactctagaaaacgaattcaggtttccatgttttagtgcttggacaaaggaaatagaacttccatagaggagaagaaggatttctcactcccatctctgacagtgtatgccctaagtcccctgcaacttaaatgtctatggtaattgtcatgtttgcaaagacaatgtggactattccaggctgtgaaactcaaattcttcaagattgcttagaaagttgggaggacccacgaagccactaagggaattgacagagtccaccttctggaagaacacagagggaggatgtgaggagacaatctcccacactccacacactctgcaaagcatcagacttattcacagatctttcacgggtgaccccttcctcccagtaattaattaacttctctaaatctgtttttctcatttgcaaaatgtggaaaagttattaatagtttatgaagattatcttcctgtgataataggcccggcccagtatttggcatgtaataaatgcttaataaacacagttatcaccaagaatattttaaacattctcaagccctttgcccaagcgcacagacattttacaagattttaggtagaatcacgagtgtgtgtctgtgtgcatgtgtgtgtgcacgccagcatattggaactaactgcccttcaactttattttgggcctgtctggcagccaagagtcagacaccaaatggtactcatgtctctctcatcctcactcccagtactaattatcttgctctctaagaaaatgtctgcctgcccctgagccttcttacctgtcaggagtattggtggtgcctccagaccaagggacacctgagttgaaaactggaaaggaccttcctcactgtaagacactaaacggtgggctgaagtgctaaagtgctgttcatgtttttaaagaccgaaagggggccctgaggaactgctgcagctctggggcagaggcagatgtccagttggggtgatgggccatgagcccaagagccagggctgtggagtacaggcggagagtgtggcaggagatgggcatggtcctgcccagaggcaggtgctttgctcattttggggcatctgtgcatggtgtggtgtgggtggggaccaagttgaaggaatcggcaataagccgtgtctgtccgatctgttttctgctctatgttagtgcatggattaggaatagggagatttgggacagtgcccttgtgcagcttgtggctgagggtttgaggaatttttctatcatccctttaaatgaagatgacagaggtcttcccagggacttaataatagattcaattaagagtaaggccatgtggctgcaaatacattaaagattttttttttccattctgtagaacaagtacagaatgtctatgtcatttcaaaccaggctctcttaatctgattatgtccagttgtgatagaatggagtcaggctttgacctgagcccaaagaagctgtcctgtacccacccaccactgttcccagcttgcatggctgctcaggccctggaagggtcttacacttagaaaagctttatatccttacatgaaggacagaacaggcagctatatggtgaagaaatgtacagacacaaatatccatatattgaataattggctggctggggagaatggaacactctgttgcctcttactcacacttatctgcttaaaatggcttctactgatggaagccccaggaagaaggcagcttgcttacaaggatcaccctggaggatgcatggctacatgcacacaatttcgaaacgagagtatttacattcggttggtgcagctgaacagaggacagaacctcatttgctttccattacactcacacttggtgtgtaagggtaaaggactcaaactggtattttgctaaaggagtgtatctgttaggactaggtttccttgcaagtaatggaaacctggaaagtaaacacttaaataatacagacatccatttttcacatgcaaaattctgaagatagggagtcagggctggtgtgctgcctctgtaatctcccaggatctgtgctcctctgcaccatccctggtgtgatgcttgacctcatggtctcagccagagccacagccatcccagaattctcctttcaagcagtacaaagggaggaggaaaggtcaaagagcataagccaactgttttaggaaaattattggaagctcccacacaaccctcctgctagctggagcttaatcacacggctccatctaccggcaaaggaggtcgggccatggtctattgaaaatcaatgattctatgaaggtgagaatggatattggcatagaaagttagcaatctctgccttggatcaggagaaatccattacatttaatatctaaaaatctgatattcccaggagtagatgcttctcaaatatatattgttttctctctgccaagccgtaacttaatctcttgtgactaatcctagcttcaaagatttggacaagctctttagattgaatctagggaaaaccttggaaatattcaagtttgctttgacttttctgtgttctcagtgtttcttttttgcattctacttgaattaaagaagaatctttgcatgataagagtttactgatactggtgatcggtcccacaaagtatttcctcttccctctgcattcattcactttgcatagtctgtacagcccagtaatggaaatgtgatctacagtcagaggacaagtcaaaagttgaagactcttttagaagatcaaatcaagatccgataggctcttttagaaacttggatttcctctttgctgtatccctcccaggtcaaatcatgattatcaccgcctgcactgggatctcttggaggttaattagttatctgtattgcagctccagtcttttattgaatagttttctctccttatctttggcatactacatgaaattttaactaggctttttagggatttagaattttttccctgtgaaaacttaattttgaatggtgtctttgtgatattattcttggataaactaacactaaaactgtgctttcaaaaaacaaagcttttctcaattattattgtctcatatgtcccacaatggccagccagcttttcattaccatccagtgaactctgttctgttgatcagagtgaaatcaaataactgaggaagtacggcatagcagttaggcactcaggcatggattcagaaatacgtggaattcagtagggctctggcacctactaacaatttggttactctccctggctttcagatttgcacccgttaaatgacaacaatacctactgtgaggtgttgtgaagagtttatgggacaatgtatgaaaagcacgtagcttactaagtgttcagtaactgcagtgtgtgtgtatgtatctcaggcagagaaaaccacgcaaataacagaaagcacctgaactaaaaaaagttttcaatcaacctaacttgtcaatttcagattctgtttcctgtccataatattgctagaaattatcaaagcaaggtagatttttaaataataatgtattctgctctctaaaagtcctgtcttatgttaataaaaaaaatgaaagccactaagagactgaaatatttttaaaactacgttttcaatacagacagtagcaattgactcacaacaaaaaagatgtggaattaagcactgtagtacttcctcccacgttcccattaattatgtcattatttttccattggcattcactttcatttctacaatttccataactgtttggtcctaattttaaatgttaatgcattaaaattttacaatcaaaggagtctgttgcctccttttcctccactgtgattggcgcatgcattcttgtatatttcagaatgtctgccctgtatctttcaggcaactcggctgccgtaatgttttgggatgacattttatttctttcaaattctggtaaacactgctctaatatcatctagcattgaatgttaccttggagaagtctgagattatcttttatttatattattttatttatttccggggacttctctttattttttccctagatgctagatattttttactttatcctcaatgctagattacttagtatgcatatgtttcagcacccattattctgaaacaatttttcaaggaatatagagtactttttagatctgcagatgtggtgatttcttaatttcaaggccattcttctgtattatgtacttgaatatttttcactgtatttatttggtgctgaagctctttgtgtcagggatagcatttttttaagttggatttgctctatattaatgattttctccctaattgcttgagtcatgttgtgttgtttttctcggcactgactaacaatatctcaaatctcccctttatgccagtgtttgacttgtcccttgtgcccgtcttttattactggcttccaatttgttagtcctaaaatggtccccacttaggtcttggatccatagtcttacttcttcatctcagtctgaaggtttataacttttctttaagtcttgttttatatttacacccatgttttttgttacataattgtacaggacaaagctctcatggacaatggtcttagaccattttcaccttagcttttcttccagatagggttcttcctttgacatttgaaagcagagtttcttttttatttcttatttattcttttccccccttttctggaatatgtttgtagagctgccatagcactacttttcatcttggtcatgctcgggcagctttttttttttttttttttgagacggagtttcgctctgtcgcccaggctggagtgcagtggcgcgatctccactcactgcaagctccgcctcccgggttcacgccattctcctgcctcagcctcccgtgtagctgggactacaggcacgtgccaccatgcccggctaatttttgtatttttagtagagacggggtttcaccgtgttagccaggatggtctcgatctcctgacctcgtgatccgcccatctcagcctcccaaagtgctaggattacaggcgtgagccaccgcgccactcgggcagctttgttcagaccatctatttgttcagatggtctcttcctgctgcatccaaaagctactcagagatgcaggtgtttgccattctaatccactttgccaaagcctgaggctccaaagtgggggacacatcagctgagcctgtttgaagcacatcttaatgactgggttctgatttatcatttttgttgttgttaaatgctgactccccaaaatctagcatgaactggggagtatttcccccatttcattttggaacactgaagaccacatcagtcagcaggaaaccaaacctctgtcgatgattttcccttcctttttcacatattttacccatcccttatgtcccattgactctaaatggaacttaatgtcttgtgtactgaattgaaagtgaggctctacaaaattaattatcatggcttgattcagtctccaatctctgaaacttagagttttctataaagttttgaaggttgttctgtcttctagtcttcaaaggagtttcagtttgctgcatatccttttcactgtttgaatcagggttctgtctctctctctctctctctatctctatctctccctctctctctctctacctctccatctctctccctctctcactccctccctctctcactctctccctctctctatctctgcctctctctccctctctctccctctctctccctctctccctccctctctctctctctccctccctctctccttctctccctccctctctctctctctctctccctccctctctctccctccctctctctccctctctctctctctctctctctcacacacacacacacacagccatacaatttagaagagcaaacagctggacataaaacctattttggtcttcttaatgaatcagaactcctaccacagagagtgatttctgaatcaaattttatagggaggggttctgtttctcatggtatattacgctcagacaatgcatattagggcagagagagaaaatgagacagcccaaaatcatgaatatccaaagcagcccaactctatctcttcaaggctatgttgaaccaaaacccccttgtgagctgttctgagttgcagatctgtttgcacatgagcttggagcatactgggtaaacaggagtggttggtaaattctatttcacttcaccagtgagctgaaaaagcattgggtaatatgttatgagttgtagatctgtttgattgcattgttgcaaagtgggaattgttttgcaacatagattcttaatcacggaggcatctatgattgaatgcgtcgaaaattggctgaaattgaaagttaactatactgcagacggcttattctggtgtataattgaaaataaattctaataactcttcttgaaagagctgctcagaggaaatttcaagccccctggaaaaaaaaaaaaagtgctttctcaaagagactgtctctctgcataatacagtaatgaaaataaagctctcttctaagcctaaactagcttctccatgacgctaatgcactgaccaaaatatgtcgatgttgaacgcttgcagacttattttgtaatgtgcctcccaagcctttatgctggagaggccttatcatttctctttgaagtaactttaggatgattttatacaaggacaacccactagaaaaaagaaaaaagagtgagcttctttaatcaaacagtctttagtttgaattcttgctccagtctttgtgaactttgtgacttcagcaatatttttgttgttgttgtttctgagcttctgtttctgtctttgtaaaatgggtttaataatataatttaatttcctctgttttgcatacttgtaaatattacaaataatatatttacatgaatagtactttgtatataattggtattcaacaccttgtaggagttagatttggatatgatacgtgtatatatacagaagctgcatattcatttcaatatcattcacatatgcatattcttgcttagatttagtcttgcaacaaataatgaccttttggtcaacaacaagccgcatattccacggtgatttcctaggattataaaagagctgaaaacttgctattgcctagtgctgttgtaaccatcgtaacgtcatagtgcaatgcattacttacgtatttgtcctgatgctactgtaaacatttctccctagagactgactgctacctctaggtgaaaatgagactttttaaaagagtgacaccttctcaagaagagccttaggcaggtccttcaggagggattccagaataaggcattgctatcacaggagatgacatctcctgcgtgttactgcccctgaaaaccttccagtgggatgagacgtggaggaggcagacagtgatattgatgatcctgaccccatgtaggtctcagctaatgtgtgtgtttgtgtcttagtttttaacaaaacagttttaaaagtaaaacacaaagaaaatttaaaaatagaaaaaaacttacagaataaggatataaagaaagataatgtttttgtacaactgtatgacgtgtgtactaagtactaatattactataaaagagtttaaaagtttaaaaaataaaaaagcttgtcaagtaaaaaagttgtaatacaagttgagctaaagttaatttattattgaataaagacttttttattaatttagtgtatttaatttttattaatttagtgtatttattaatttagtgtatcccaagtgtacagtgtttataatgtgtacagtaatgtcctaggccttcatattccctcgcctcttctcactgactcacccagaggaacttccagtcctgcaaactccattcatagtaagtgccctatacaggggcactagtttttcttttatactctatttttactgtacctttcctctgttttgttatatttagatacatgaatatttgccattatgttacaattatctgtagtatttagtaccgtcacatgctgcacaggtctgtggcttaggacccctacgctccacggtctaccatcgaggttcgtgtaagtgctctatgatgttcatacaatggggagatggccataggatgcatttgttagaatgtattctgtggttaagtgacaagaggctgtatttaagcccctaacctcctccatttctgcacgcctatgggcaacaattgagtaggagaatcagaaggagacacagagccccaccacggaggactgaacactccagtctcggatgcagaaaaactagagttccgaatctggctcaaggttaacctctctacggctacattttttccgtctgtacaactgaagtaacagctttatatatagctgtctcttggtatctgcagcagattcgttccaggacccccacaaataccaaaattcaaggctactcaggcccagcgttcctccctgcggaaccctcggaaaccaaatgagctctccctatccacaggcgtggcatcctgaaaacaccttgctttccatccatggttggtcgaatcctgagttcgggagctgtggacacggagggtcaactgaactccagtgcactgcgttgtaacataaaacgatgcagactgcctggcatctgtgaagttcttttgaaacgtgtgcttgcagtcgcccctgcagacgcagcggctgcgctgtttgtgcgctgctccagagcccacggaaggagaatgggcttcagaacgaaacagatctggactcctcccgactcttcctctaacaggctatgaaaccttgagcaagtgactgtatgtctgtgaggccacattcccacgtaaaatagagattataacacctttcagtggaaggaggaagctttattgagatggcgaacaccatgggcactaaccatgttagctttctccttaactcctctccgcttgttgtcagcctagttttgagcagcagtggactttagtgttgcttttttcatggtggcttccgctcaggaatggctagatagattgtcatctttgagatgaggaagaacccagattgcccttaaagctggttctttctgtgtccagagaagtcccctgtttccctcttgtcttctaaatgaaacatctgcttcttagtccaagtcagcagatgccaacctgggtacacaagctgtctactccatttcccggtcagctccaacaatgctgtgctcacttcccttccaaaaataagtccagtgaagtctgcgatgcatagccaggacatccatcctcggctggctatggtgaatgtggcccctgagctcgtcttctccttggaaggccagagtcaccctctgtagagaaagcaactaaatcacaagaaaagagacactccaggtgccagggcagtactctttaaggaatgtttgtgcatattgagggtgatttggaagtgctctgcatacaaccacatcacatctccctcccttgttctcaaactgggttcaaggcccacccacctgtattcgtaggtcttttccagatggcccactgtctagatcatactgcctaggtgtgcactacttttaacacgccaggtgctctctacttgtaataatcctgtctcttctgcttgtgagtgaagcctggcctacccccaaggctgataagtggcaactatatatctgacctcctcataccattattgagggtagtaattatctgctcatctctgctcccgttcctcaccaccaaccgtctttccagttcctgtggtgcccaagccaaaagaacaaaaccacaccaatcttaagtagatattttgcatgaaatttgatctactgaaagccaggctggctcatcaacctggtggtgcacaagagaaggtatctcgcagagatgttacaaggattagacattaattaaagttcttgggataaatgtgctctcaacaatggtagaattttctatttgctttgcagactctgattctagtctcttcctataaatcagtttctctgtggactgatgactaacaaagcaaaatatcctccatagccccatgtcctcagtagccgtatttaaccaggtcacatggctacaccaagcgtaacacaagccttaatgttgtgaccacagttattttaggagctcctttagtttgacaaatcccagttcttctgcagcataaccttttctgggatgaagagcatagtagttaccaatcacaggaaaaatgtaccttattgataaggttaggagcattattttcatataagagagggcagtctatagacagttttttaaatttaagtttaaaaaacttttaaaaacttaatttgaaaacatgctaacaaggaggcagggtgtggtggctcatgtctgtaatcccagcactttgggaggccgagacgggcagatcacctgaggtcaggagttcaagaccagcctggccaacatgctgaaaccctgtctctacaaaaacacaaaaattagccgggcatgatggcgggtgcctgtaatcccagctactggggaggttgaggcagcagaatcgcctgaacccaggaggcggaggttgtggtgagctgagattgcaccattgcattccagcctaggtgacacagcgagactccttcaaaaaaaaaaaaaaaaaaaaaaaaagatgcctaataggtaaatcacataaagaaaacttttctggaattgctctgataaaatgaaatgggctggcttcaagtcataccattatgacatcccatttctacccccttctaaggataacgatagcattctgaaaacctagattttagtcccagactttgccactaaatagccaggaaatcttggacaatctgtttggtctcaggtatttttggtttgttttgtttttttaatttctaaaatagaaacagtatacttctccctgtacaccatatgaaaaaaaaaaagtttaaatttagaataataacaacaacaataatagcttagactcattaagtgcttacaggtattcttctgaaaaactttgtataaataaaccaattcaatcttcacagcaccttcatcggccagctgctactattatactcatttgatatatgagaatactgagacacagagaggtcaagtaacttgcctaaagtcacacagctgttgagtgtcaaagctgagagttcaaacctggccacgtgagctcacactggtacaactatctcatattgcctttgtaacaaataagacagtggtagtcacagcagtgtgtattctagaatgttaagacgtcttttagcatagaaataattgtagacataccatttggaatggaaagtgatactactactttggatctgttttttgtttgtttttctttcggtttggggatttactaagaagttgttgactgtgccttcctctctttgctgatagcatttattttccagagaaaatggcaatttctcagataagaatttgatagttgaaatggaagtgccactttcaataaagaaatcttagaaaactaaaaaaattacacgtgctgtctttgatatcacaccacagacatcctacctcgtaggtcagatatagttctgcatagttgggaactgcaagacctaactattttctgtttaactaaggggtagaagaatctctttctgaagcacaaccgttgcctctgccccaccatgcaaagacctctcgggccctgtcttgggagaggctggtaacctttcaaaaagtgagtggccctggcccggcgcggtggctcacgcctgtaatcccagcactttgggaggccgaggcaggcagatcacaaggtcaggagttcgagaccagcctggccaacatggtgaaaccccatctttactaaaaatacaaaaattagccgggtgtggtggcgggcgcctgtagtcccagctacttgagaggctgaggcaggagaatcacttgaacccgggaggcggaggttgcagtgagccaagatcacaccactgcactccagcctgggtgacagagcgagactccgtgtcaaaaaataaaaataaaaataaataataaaataaaaataaataaataaaaaaaaagtgaatggcccaatttctcttctggttctattgagctaggaagacatgggggcgtccatcccggaggaggatggtggcagagaagctccaattctgagaacgtctttttgttttctttcttctgtgatcttgtgctggttctgtaacctccttgcagctgggaagaatataatcttcaaagggtttccttaagcctaagcaaaggatgagaccaaaccggaggaaacagtacttcctgatgctggaaggataaatatgtgcaacctgttcttatgagaataagacaaagactaagagcaaaaatgggttcaataaaggttgagatgcatatatcctgaaaaagattattcacaaaggaagacgcagcctttgttcgttcttacctgtggaaagtaaagcccagggaggactcattcctcccgtcagaggcttcctgcaggctctcatcagccgtattttggtgttgcctgaaccatgagattgacctaatttgccatctttttttcttgctaatgaggctggctctaccctactgcttagagaaagatcttgtgttactttcctagtgaaatgtgagacttcgagtccagaggccacacttgcaggatgtctcactccacaggtgatttcaattaagtgctgtgcctgctaagccagtcacctcacccttcttaatatgggaattacccatgaagggtttaaaaaacctgtagatgtccttgtcccacccactctaaaactactgaagcagaatctcaaggagggacctaaacattaaaattgtttaaaatcttcctaggccatttgggataagaatgactgtatctggcgcacagtgtctccacatcaataactaaaggcaactgatctctgtcttttctttgctcaccaggctacagaattaagcaagttactcgtattttccagacaggaatatcagcactctatatttgctgtcagtaccaatacaaagggaatcatagggatgacattgctcaagagacccgaaattggtctacacaagcaaccgcatattcttaggagcagtctctctgtgctcatttgctacttgaggacaattaatggctgtcgacactgacactggttcctaatccctctggtcagacttgcattctttacccaggtcaatgtgataatgacaacgatcatgttttccttgttcactacactgaggagttctgtaaaatggcagcatgactttgaatgggaagtcggagttttacttgatattctgctgctgtgatcttagaaagccactaatgttgctcagccttagttttcattgttttgttttctcattgataaaaagaggggagttagactacattggtggttttcaaaatctgtttcacattggaacactttaaaatagaccagactgaagggatcgtctctggttgcagcagatcttaggtggtagagctgcgacctacctctacgaagcctctctgagacctccatggatccctggtctggtgaggtcaaatgaagagaaagtctgaaggtcattcactgatacctgtctggggttttgaactgtcagcctgcctgccatttccaagggggggaagctatgggttgccaacctcttttctttgagaggaaaagactagataattggcagtggccacaaaaggtgcactacttgcaaattaattcagtggataactgagtttctttaaagctctaatagtctagattttttttttttttttttgatggagtctccctctgttcccaggctggagtgcagtagcatgatctcggctcactgcaacctccaactcccgggttcaagtgattctcctgcttcagcctccccagtagctgggactacgggcacatgccaccacgctcagttaatttttgtatttttagtagagatggggtttcaccatgttggcgaggatggtctcgatctcctgacctcatgatccacctgccttggcctccctaagtgctaggattacaggcatgagccactgtgcccggccccaatattctagattttaagacatccaatctttaaaatgactctttagtgaagaggagaacaaaaggagatactcactaaaattctggtattgtttaggagggccatttcctgacacacggcagccacttggagcagttggtcaggctggataaacagtgctaagcaggcaacatggagcctcacagacatgaaggtgtgggaagcaagctctagcttgtgaagaccaccaggaacctgactcccaggcatcctccacacattagagagccaaagcagtgtgaagttgagtcagtacttcattctggaaactggagagagatccagatagttgcttgtcaaaagaataacaatttggggaagtgggagaagcaactttgaaacagatgaaacaatataaaactccaataaactcaggtatcactctggaattaatggaggacaaattggatttgctgttaagttaaacacccatctgctcacatccctggagcccataaatttgtggggctgattagttgttgccatccttagagcagcagggggctaaccacgttccctggagttttgctacagacatggcccattccctgatgcctgtccagacacccaagctacaggggaaggaaaagaaatggagttgacccaacctggggtcatccaaaaagtttggaggacatagtgacacctcatcttgacctttctgaaagatggtgttgaggaatctccaaaccaatttaaatttcacccactatttttttcattactacaacaaacattgctttttctcatctatccaattatcgtcctgtcttttcctcagtccccctctgctacctgacttgactcctctaacagcaattctctctgtacccaaaacgtgaagccttaatataggctcttcagcataatcgcttcttaattaagtcaggctgtggctccgtttcccagaatcgtttccagagggcttaattttacttctgctcagaattaatattttacattctacacttaaaggaaaaagaatgaaaaaaaaaaaaaactcagaaggggggaatgagaaaatggttgaggggaaaagagagatcatatttcaattcctattacagaagcatccgagcccctgtcgttattttcagcaagtaacactcaatttgtgacattcactttagcaaaacaaagcatggatcaaggtaattaaatggcacagctcagagtgagttaagggatgattctatcaacaggagactcctgctgatatgacactttccatgtgcctgctttgttctggccgtgccagtcgtggcccagagggctgcaggaagcctgctgacggttccagcacatggtgtacccgggtgtgcgcggagcggcccagcatgagcactgtgtactcgtcatgtcagtagaagacccaggggatgaaggctgttagtgacattaaggccccttcctcaagagctggccaactcttgtcctttgccctggatcagtagtccctagggctctactcaactctctctctctctctcgtgtcgcacagaagcttatggatacatttatcctgagattgcagtgagcctaatcatctagaggggagtgcaggacccctagtcctactgaaccaccctgtctatcatccattcaactgtttaaaaaatacgcattgacttcctactatgtgctgtctggttgctggagctacaataacacagtgcagaaacgtgtgctgccattaccgagcctgcagatctgtgggtcacagaatacagggccaggctgagagttcacttggacaaactcagtactgtgagagagttgtaaaagaagactgagaggtctccagacctgagaccagaggtgtgtcctgagggtacacactaccacaacatgggttctgctttggattttggcaatatgggcataatcatgtatgcacagacattctgaacttctttgatcatcattcattataagacgacttctgcagaatctcccaggagaatacagagtggtgtcaggggaatggattcagaggccatggagctggaactctggtggtatggcttcggctgaatgtgcaggaggttgcatgcgacctccccaagagattccttcccttcatcttcagcttcccttcctctctgcctcctagctgagactgatactgtcattaggggaggagcaaagagccaagggaggttgaagatgctcagagggacccattagactgagtatctatttacctactcatgtggaatacatgaatatatgtgattatacctaaataggtgatcatacctgaacttctcgctccagtggctgtggtgggatgttgacaagctgcattctaggacctgtgactggggctgccccagggagtttcccattctgttcttttgattattagccagatagtcccatcagtccagtctcatggccagcaaaccgtaccaacgaagggggactcctactacttagcctgctcttgctgagggactgcccaaattcattactcgccacagaagtttattttctaaacaccacataagataacaatgcggtataccagcaggaattgagaaatcctttcatatttggattttcttcatcatggtatataactcttagaaacatacttatgataaggggcttaggttgtagaatttctcaatttccttccctaaatattttatcaacatgatggatttttcttaagaagattgaaagatacattttttttttcctttggccaatttgggtaagaagggaatttagttttgttttgttttgttttgttttcctaaaaaaagaatttaggatgctggcagtgagcccatgtatgttcaggtgttttataatgggaattagaacctcttcatttatctcattttgttacacttgctaccaaactccatcaagtgctccttcgacaacaggcaggctcacagcattgccaagcgtgtactctgtcaagcttctctgggtccacgtttggggatccttgtaccctgtgtccacataaaaatgtaccacagattgagccctgaccagactctaggccctattttaagtgcattatttatagtaagtatacctcacaataatcacatgaggtcaataatattattaaccatttcatagctggaaaattgaggcatagagaagtaaagtaaccaccccaaggtgataagaaagcagcagggtttagttttaatgacaaggccctgcacttgaaaatcgtatgaggctgctgctttgtgaggccttcccagtaagaggggtctcctttctcctcgccgtgcgtttgctcttcccagcctttctgcaatgctcccagtcctcctgagtcagacaccagtggctggagagcaagcagaggcagcagacgtgctggggaaaggagtgaaagggcattgcctttcagtcacgtcagacaccttcagacctacatgctaaatagggaaaggagttctgggtattaaaccaaaccacaggaaatctattctttcccctcaagtgaaatcttactcttttacagacactagttttaaaaattcacctcttctatgaagccttcatctaaatatgtactttggcattcttctagttcttacgcctttatgtccatttttttttacttattagtacattgtatcttttaaaatatgtgtgtatatatgttttttgttttctccatttgattggaagttctccttcggagtgtcaaatgttctgcctttcatacttctttcaatgggatcttggataggtctgtggacatggggttatatggagcatatggaatggatgcacagctaatgttggggttgaatcaagatcctaacatcactctataccattagaaacgttcatgacgtttggcttttgcaaagtgagataccaaggctttgcgtctaaccaagaatctaaagtatgaaacctaatatcaaccttagctatagacatgtcagtacggagcacaggtgtgaaagatttagaagctgcatgtatgtgcatggttagcacagagatattgataagaggataagcccacttcctgggcaggcttcaagggcaaatacgcaattgatcatctaagacggggtcagcaaactgtgcccatgggcccgatctaacccattgcttcttttcataaataaagtgtcataaaaacacagccacactcattctttctcatatggtctgtggttgctatcatgagacaacagcagagctgaatagttgaatcagagaatagagggcctgctagcctgaagatctactacctggcccttttctctatttctatttttgatgcgtataaagaaaaaagtggatcctttcttctaaactcacaaagaaaaaaaattctacaagtccagctttcttccccaggccctaacccatttcttttctcttctactagtatcagtttgaaaaggagatcccctgaacttctgtttctgcaagtcaattatttctttagaatattcagtgccatggtctatttatatgcagattttagatgaagttccagattttttattgtgctctacctttttagaggacattttagcatacgtggtactaaaattttttgtgtattgtctcacacttagaatcgttttttttcaaatcttgcaatttagccaggaacttctagggagatgtaataaccgtcagatacctccaacagaaacgtatagtggggaactgagaaaaacatgaactctaaagggggtttcaatctcagccttatcaacatttggagttttgttccgattttaacctactattcccagtgagacatatttcccagttttcagtattgatttttatattatagaagacatacaaggacgtgctcactatttctcggccacattcacactataaagtgcttgctaaagagcatgtaaagctctaggtccagaattaaatgtggacagaacacgcaaaaggggagattaaaataatgcactgccttgcagggctcccaggccttcggctgtgtgtgaaaagtttactcttcgtaccctggctgtgccacctgataactcggggtgaactcatcttaaatcccacacgttttctcagtgggattatatcccccaccaactttccttaactaaaggtcaaggggatcgtggagaggggtccagaaatagcaaggcaagtcctggagactcagaagcatttgatgcagggaaaatatgaaccctgagcaaagaaagaaattcagggcttacttcagacttgaaagtcgcaccatcaaggatttttgtagctgcgcggatggacatcaataggtgattaaagagtgccaggcatggaacagtgcatctctaaccttcggggatggcttcgcaatgggcagccctacactgcctgtgggctactctgtaaaatattgtggagggaggtcatctggggagtcccttagcaaacaaggggaccctgaagaagggcaagtgatgagaaaaacttgggggtgtgtgatctgacatacaatcagctgcacagcctgccaggtaatttttatattttatctcatttgattcttgccaaagttgtgaattctataaatcatgtccatttaataaacgagagaattaagccttagcagagttaaacaatttttccaaaattatatgatttgtaaatgatggaactggggtataaattcatatgtgatttttatattataccatgctgggtcaaaatattactgccccaggatttttcagggacccaaaacagaagaaaaagttaatgtatgtgtactttatagatatgttttatttaactatccagaaaggatagtctttttgttaacttttgttttgggttaaggggtacatgtgcaggtttgttaataggtaaactcgtgtcatgggggtttgttggacagattattttgttacctaggtgacaaagcctagtacccaatagttattttcttctgctcctctttctcctctcaccctctatctcctgataggtcccagtgtctgtggttcccttctttgtgtccatgtgttctcatcacttagctcccacttataagtgagagcatgtggtatttggctgtctgttcctgcattagtttgctaagggtgatggcctccagctccatccatgttgccgcaaaggatgggattttgttcttttttatggctgcatagtgttccattgtgtggatgtaccatgttttctttatccagtccaccattgattccatgtctttgctattgtgagtcatgctggagtgaacatgcatgtgaatatgtctttatgatagaatgatttatattcctctgggtatgtatatatacccaacagtgggtttgctgggtcaaatggtagttttgttttcagctctttgaggaatcaccacactgtttttcacaatgtttgaactaatttacactcccaccaatagtgtataagtgttccattttctccccaacctcaccagcatttattttttgaattttaatagtagccattctgactggaatgagatggtatctcattgtgctttagaaaagatgatttcaattcttaatttaggtaatttcctttaggcatatattgtgtcctgcgacaagtacagcttcagacctagtttcttttgataacatatattcttacaaaccccatttctttgtaataccaacatgcctttattattcatactatgaaaaaagaggcagtaacagtgagtagatggtgggatgtaaactatcgtcacactcttgtttcctcactatacttactaaagggtgggaagatatagaatctatcatatattgcatatttctctgggaggcctttttaaggaatattcaggaactacttttggtggcacatccagaaagaagacatagaagaataaaaaccacccagggttacatgaattcaaaggtaaagtaaggacttgacaaagagcaaagcatgagcctgagaaaaaagcaggccccctgaggtccgctgatgttgtgcccgtgttttccctctcatcgagcactatgacaggtgcacgggggaaggttggtcactcgaacaactacgtttgttcagataatcactggcactcaagccataacattgtagtggaagatggcaagctcagatcaagtgacacctttccccagatcctaagcaataatgatagtaattgaaacactgtgcgtggcacccatgaatggtaaacaggggatttacttacatcaattaaatctaaaagttattgctgtgataatcatatccaagtaaagggtagaaagggcaccatggtgcgtccagaaacagaatgcagtgtctgtttatgcatatcggggagggagtatgggaataagtattgaacgggataaaaagtggtctgaacgttcccaaggcctttccatcacctggagagagctccattattcataatcctaaaatgcatgggctgataattgccttaatcaccagagaaacatggctgagatgtactgaaataagccataaaactcattacaagataacaagattctatctattctccgaggtcacactagagttccataaggtcaaggagttaatcgcctcgttcagcagaaacaccgtagatagtaaactctgtatgtgtgtgtttgggtggggggaggcggtgcatgtagtttaagcctttctaggttctcagccaatacacatggtgaccagataggtgaaagggaagtggatgatagtccatgaataaccaataattttgtgctttttttcttcttaacttttggggtgaacacttcttgtatgctagtaattgttaaataggcttgttttgcaaagttagcatttcccagactgacccccttcccaccttacgatctattcaattctaatgacctgcccataggtcaacagtggtgccagggcagttgctctagactttgagcagacacgcttctttcccgtttatctgatgaagcacaccacagacagttacacaggaaggaagcaggaagcttaggcatcacccttctcactgcctctggtttctggaggagggaacaaggcccagggaggtgtaatgctgtctaacaccacacagactattcatggtatagcaggaccgtgaggcagtcccaggtaccatttcactaagacaccatgttctctgataggcaacgctgcaagcaaatgttctttcttgaagatgaaatctctggattccccagtgattctaaaagcaatgccctcctaaatttggggggtacatcctcacaggtgtgctagtcaagaggtgtggacttagagtaacattggttcactgtggcgaggggccattgcttctcctacattactgacctcattggatgatgttggtctgcatttgtcttctcttctctgccagacctctgctccaacatggctcctcattctttgccagagcttttgaaagttcggtccagccttcagattttgacttccctggtttctcagtaaagactattttactatgaaaaacagtaaaaataacaagactgctgagaagatgtttgtgaagataaaatgagattatgtgcctggctcacagaaagttctcaataaacagccatcatcatcatcaccatcatcatctatgtaagaagggctctgttgagggatataggaacagtaatttactatttcccattattactatgccctccccagaggaaatgagcttaaactacatcagaaaaaaaaataccaaatttaaaaaaattactgggaaattctgttatataatttcaagaaaatatcgagaaatctcttggcctccttcttcttcaggggttggtaaatgagtcattgtttggagactgggtgactccagtgctagctccacatgttttctaggcatttagatactattaatcttcaataagttacatataaatttaatctattgaccaagatttctagttttttgctcagttctttgtttttggtgcatgtggtttacaaatatgtagatacaaaagaccaagaatgctgtcatttttagttgagtgaacaacaaaccttagatcctgacttttgcaactaccgactgttctcaaaagtatttttttaagtttgcttcataaaaacaatttaaattaagctcctcaaatatgcatttgttgaggatttactttgacagatactgtgtaggtggttattgcagaattaatcctcagtaaatgtttttaataatcatttgattttcatttaacacacagtaagcaccacataaattctagttgtgtatagctagtcaaaaaacaagttgaataaataccaaccagttattaaaaacatttatggagaattagctactcattgttatctgcattcaaatcaattgcacatcttccatagtaaactttaagcaagattccctggcagatgctgtggaataaagctcattcaccagcactggtaggattcttggtcatacattcagctcgggactagtgcatttaaatctttgtctcctaggctggggataaaaagatcataaaggccgggcacagtgtctcacgcctgtaatcccagcattttgagagaccgaggcaggtggatcatgaggtcaagagatagagaccatcctggcgaacatggtgaaaccctgttttttactaaaaatacaaaaattagctgggcatggtggcccactcctgtactcccagctacttgggaggctgaggcaggagaatcgcttgaacgcaggaggcggaggctgcagtgagctgagatcacgccactacgctacagtctggaaacaatgtgagactccgtccccgcccccccgacccaaaaaaagaaaaaaaaaaatatcataaaaagcaaaatggattccactccgggggaagcttaggtcagctcatccgctgtgctgttctgaggtcagggaacagatagatacaggcccaaacagcctgaggtggcccccagcagagctgctctttgtcctggaagcagacactctcccatcagagaatgcttagaatacagacacaggattgggagcatgtcactcgagttctagacttatgagttaacttgtgaccttaagaaaatgacagccttcccaatatccatgtcctcttgtgtaaaatggaaatgtaaaagaagattggccccataaggcttctgtgaggatcaaagagcctaagaatggaggtaaatggctatacacatggagcagcacctgaatagagacatgatcattgtgttttttttctatgagaaaaggcttgagataacactcacagttcctgatgaggcttccttggcaaccagatatatttactgggaaaatcgatgtactcagatttccagtggccacaaaccagaacaaagcaaggtggtgccccaggccttgttcccttggcctggggcccagacccaaggtcatgcacagctgacagaagaacgagaggcttcagggacccaggctcatctcctgacatgctcaactcactctcacagttgatgtttttggaagtttgctgctcagcactgttgtcaaatacttagcagcccaacttggggcaagacagcagctggctcaccctacctgtggacagaggcagagcgggttctggagtgggcagggggatttgtcagcatctggattgtgactggtccagcatgccctcccctgcctgttgggcagcgggacttagacctgctttctcaatgaaaacaagcaaaccaatgagaatagacacaataggattgctccacgctgcagcagggcaggaatctgagcaagtcggggcactccagaccctccgatcaggaagtacgccctggcacaggtggccatgggtggcggtcactccgccttcagaaagccacttggaatgcaacctgcacaattgccttcatcctttaccgccctgccagattgttgacggaagcaaccttattaccagtctccaaaacatctccataaaacccaccgatcacagactgtagcatgattacagccaccccgctatttgacgagctgctgcaatttctcccagggactggatgatgcaggcttccttcaccaggttcccatgggtgtgccctgtgtggaccacagagccagctccagaaaggagaaggcaggaaagaagagacttcggtccctgctttgtagtcttcctttcttagggaccttttttttgaggttatcttttttttttcttcctttgttctttcagtctcacatgtctccctccacctgctgtctctcttagccttcagaaacagatgtggcccactggaaagacaacctcacagtcttccttgcttccaggggaggacggacatcagccggagggccctgggggaggggaaggctcaggcctcgctgcctgcagctgcggaagaaatctctgatgaatttcaaaacctgcctttgctttggatgtgatcaacagtcacagtggggcctctgtgttttactatatgaacaagctcagagggagggagaaatgcagccccctggctctgcctctcccctgccacagtggctgagtggagggcaatcctcatctgtgcaaactgtgagatgtttagcaggatgcaaagctggagccagcttgctgctcctacccgagtgcctggagctgagagtgtagggcacccctgcgtgtggggtcctggtggagcttccagtatgagaacacaggtggggaccacaccaaagcaccccctcagagggctccccccgcggcctcttttctaggctgtcctttggaggagtggctttcggaatgaccaggatacattggtgataattgggctggaaattatataatttcatgcaagtaaaattcctgtctcaggttgttacagcctccagccttatcaggaaggtgggcaggtgctcattgaaggtgtttgctcaatatttgtcgattaagctcaacaataccttcttctccatcagcaacaatgtgactgtctcttggcttccctgcccgtcagatggagagttcattcattgattaattcaacagacagctctcatgtgtacaggactgtaaccggtgatggtgggagaagacaaccttgttcctgtcctcaggaggaggtttggtgggatcgtggggttcatttttaaaggcataaagtcagaatcctctgtcagcaggagaggcaggaagaaaggaggtcgtctgccttttctttcagtggttgaagcccctttcacctaaggcttcctttccaggcgcagccctagaatgtcaaggaaaagccatgtgacccatccacccccaccgccaaaggcagggccggtgtccttctgtgtgtcccagggaagcctgggaggaggtgaggggacctcacggccacaagaaccgcagttgtattgaaaagcaactcgtccagtcccgacaggttttttttttccgggagtctcagggttccatctaatgcagagcttctcagagtccggtctctgccaatagcagtgtcatcacccagtcatatagttgggtgtttgtcccttccaaatctcatgctgaaatgtgacccccaaggttggaggtgaggcctggtgggaggtgttgggtaatgggagcggattcttcgtgagtggcttgatggggtcctggcagtaatgagtgagttctggctctgttagttcgcctgagatctggttgttaaaaagggcctggcacctcccacgcttgctcttgttccctctctcaccatgtgacacacccactccccttgccttttgccatgagtggaagctccctgaggcctcaccagaagctggcattggagccacgctacttatacagcctgcagaactgtgagccaaatacacctcttttctttataaattacccagtctcaagtattcttttatagcaatgcaaaatggattaatccacccagctactcagaaatgaaaaatctcaggccacatgcacatgtactcaatcggaaatgctgggcctggggctcgcacctgtgttttaccaaccccgcccccgccactccgccggtcctcgggcacgctgtagcacactgcttcccacatttggctgcatgttggaatcactcagagagtttttagaaacaggagtgcagggtcccattctcaaggattctgaggtgatggggttgggatacgacttgagtatgcgggtttttcaagtcttctgaagtcattcttgtgtgcagacaaagttgagaactactggcttagtatctgagagcttagctgttaagaaaacagaggctcccatccttaccctacaccagagctatcctttgtgttttctggaattcttagcaatttccagacacttgctccatcatccgggagaagatgctaattagtagcatttaatctggtaccttcctccttcctttttggcaacacctcagagaaaaacaggaaacctgaaaaaaggcaaggtcagcaacaacctccagggcttccagaaacacagagaagtctctggctcggttgtttctgtgcagggggctgctctcagctgctttgctgtaaaagacacgtatgggaggctgtgggcttggcctgctggtgagctgggaccacagcccctgccgggtccattccccactcagaagtggtggagaaaggacggtggactggcagggaggacaattgagatcccctagatgtttagcacattgttcgatctgactgtggaaattaataaatatgctcactggaatgaaaagaaacatctcctacccagccaagctctgtgtgaggcaatgaagggaaagtaaaagtgctgctcagagaaattctagtctccactggaagacccagagcagcatagaagcagtgcctttctgaagtgctgggaccaaatcgattggccatctgggcacctgccctatcccaccattgaacctgtgccctaggtcctgggaggacctcctccctcagcctgggaaggaatgggagggcagatgagggacagcctagaccagtggtcagttccccctgcttttccttcatttccctcaaatccaccagatcctcatctgccattttcctgggcctcagtactcccaccagcaaagtgttagtgccagacctcacgctctagggcatagaggagacatgggtaggtaaagggagaaggctttgcattccagtagtgttttatgcaaggaaagaaaagacctcaggaaaaaaagtgtaagagattcgtctccataccaccaccatcccagttacgggggtggctggagaaaagattttaaatccacccacacagtcctttaaaaagacttgcctaaaaatactgcacctctagatgaccccacttcatttccccacctaaaaagacacagaagcaactctcgctttcttttccttcctgcgatgcagcatgggctgtgaggaggcacttctgaatccagtgaataactgcaggcattgggaaccatcctcccaaccacatggatagacttgggacttgacataggtccttgagagatgctaaggagaaggagttggaggcttggctacctgtagcctgtgtcacagatatactgctgcaggtcacaggaggcagagctcctgctgatgggttttccggttctggtttggacaaaggaggagggcggggcataagagctggggaggaggaggaaggggcactacctcgttctgcccctgcgcgctgagctctggctttttcaccctgtttttcttttcttggaggcccagaagtcttcagagagggtgtttgagacagagctagtctaggtccaagtttggagtaggtatgcaactgtcactataaacacttcccaagaagatgacctacttctgcagaaagcacttgaattgcacgtggaatctgctctttttaagtttgaccgagtcatctgtgctccgtgagccaccgtggtggtctggcgctgttgctcagctctcggaggctgaggagtgtccctggctctggaactgagggggttaaccaagtgcttctctgcattgttagcggggaggaaggcgggcctggagaaggtcaagcccttcagatgaaaccctctttgagcagttgagctgtttccacttgtggttttacaatggccctatgaagaccagcccaaaaaaaaaaaaatcatcgaaatgggtcaggtgaggggacccttgagtggaggcccagcatcaagcgctggcccagtctgagagttagctgctgtctagggttctgagccctttggagaggaaagcatctgaggccagccttcgatttgggaaaggtcagtggggaattccatggcagaagaactatgccgtgcaggaagggagaaaaacaagtcaagctttccctggcgtggaagaataaagggcagagggtggaccagtgtttttaatgccacatgtcagcaggtagctgctcgcaaagggccagcctcttcttcgaagtttttgttgatggtctccaccaattccagtttgtttttcctttgtattgttattagcaccaaaatagaagacacttctccactgtctcctcagaacaccccatgcctacctctgtcttgtcaataggatgctatattacagctcagcacctacttatctgtgtgccttgccaggatataagaaggcaggcatcatatctcttatcgctggaatcccagcactatctcagcatatcacagtagtgtgtatagacccacaatcttttatctgcaaattccacattcacaaaggtctggaaacctcgagctttcttacaactcattttgcagaaaaccctgggctagatgttgtcagggttgcaaagtcaaaatgtaggagcagagtggaaacagcagactcaaatacatggcaaaacagaacagaaccacagggcaaggcaggcagcaagctgttgagtatgaggggaagagtgagatgtgagtgacacattctgaagtgagctctgaagagacctgaggggccaggtggcacttaagctgggtttcaattgtagataaggtttgcaaagataaaggggtggggtggggagataatcgtgggacaacatggttttctatttccctaactttttatgggcatattgctctctttccattaagttttcagtctctcccagggctaggatcttagttccatttcttccattctgtccaccgtacacagaaaatgcagtcatctctcagaattctcctattcaataagaaattattctgggacttacacatagaatgtgcttgagaagattttcttgaatgaataagaacttaagggcctgtaatttgttttcattcataaactttatttttggagcagttttaggttccagtaaaataaggggaaaatacagagcattcccatagaccccttttcccactgccccagcctccccaactgttaacattccacacccacgtggtgcagctcttacattcgtgaacctacatggacacgtcactatgctgatgcccgtttgtcctcgcattctctcttattcaagagtaatagaggatgcagacgaggacggcatgccttgctctgattcagcgacctctctttcctcccccgacttagaggttcctggtctgcggagaaacttgcccagatgcaaagccacagagcagagacagcagaatcagaagctttaaaaggtgtaagcggccggacgcggtggctcacgcctgtaattccagcactttgggaggccgaggtgggcggatcaccagaggtcaggagttagagaacagcctggacagcatggcaaaaccctgtctctaataaaaatacaaaaaattagctgggcatggtggcaggcacctgtaatcccagcttctcgggaggctgaggcacgagaatcgcttgaaccagggcatcagaggttggcagtgagctgatatcgcgccactgctctccagcctgggtgacagagcgagactccaaaaagaaaaaaacaaatagatgtaagcactgagaaggcagagagagcatccctgtgcaatagaggaagacatgtaggtatagatactaaagatagaaaagacctctggtatcagttccctccctcagggtccagagcaggggaaatattcaaggaactgctgcctctgatgtctcattggcagaccacagtcaaaaccacacatttttcaccagctcccagggcagctgaggccaagtgatctcttctcccatgagtgtggcctcaagaacagaggtactgacaccacagacccttaaagtgttgtgctctttacagtttgcaaagcacatttaaagtattgttgcagcctgaccacatcctagtgtgcagggtgcttcggggtcctcctgtctcacaggtgagagagctgcagggagcaaggggatggccctccatcacactgggtgagggagttgagccagaccctgtatgctgagccctcagcccaagctttctatagggcatggtggccgggccatcgacttcaaggtcctctggccactgcttgtgataataccaactcaattgtatttagttttacattcataatgagagaaaaagtagtcatccttctgaagtacggtgttttagtttatatatagcaagaaacatttctgagtcaaataccgttaggaaaagtttcagcatagatctttacctcgaaccctctccaagtctttaacataccaatgtgatcgggatgcaatatttgaccgtaattccatttctggcagagcatcttggttggaaatctctttgggggatgcagcaacagaatcgggggacacgtggctgcttttctctccagggcttagctctgagctgtcctccacggagggtctcagaggagcttggaggaggaaagatggaaaactgaaacctttaagaagagtctaaaaggaaatgagttattcaggcataagaagaagaagacactggcaggaccctgaagccaattttccaatatgtgagcacgtgaaggatccgctacatagcgtggtgggtgaggggctgttcttgcaagtagaatgctcagagcctggcttccttacagccgacagaaccgaatcagtcggccacaaggagcttgttgcatgaagacagggagcctctgcggccaggagccgggcaaggcggggactcagtatctcagggttctcaaagtgtcccgtaggactcgggtgggccagtttgcatcatgtattgaggcaggggactgaacacaatgacccattcaggtggttgttggcctcagggtgctgcaataatgaggttttctgtagaagcaggtctgaaagacagatgctgcaggatgaagagggggatggagaccttgggtgaattcattcacacccaaaccaggagggcggagggggtgagggtgagggagggagagaggaggaagactcagagcagagtcatttgaaagagcccagaagccaccaggtggaaaatcaccctgcagggagctgaccttcctccctcctcccgagaggcaccagccggcactgaccctgggtcccatctctgtggcctgtgagaaaagaggtgaaaagcggctcctcatgcctcgaaaccttgctgcccacatctgagggctggccttgatctctgggtctgtgcacccctccccccttattccttcctgacctttcatccatgaagcggggacagagggtgtggggctagggtggtgaagagggacggaggaggcaaagaaacaaaaggaaaatcacgaagggagactgggccctggggataggctacttgcgaactcctgagtttcattaaatatagaaaggtaggatgaaaaaataatattcactcattgttacagtttcaaagtcggaagctggccttgatttcaaagaacttgtgtgtaatgtgatgcatggctttctcttctgtctctttttataggtaagtgacatttcattctgctcatccccaaggcaaagttggatgtttttaaagtggaaaaaaaaatgaacggaaaaagaaacggggaaggtgggaagaggtggaaatggaagggcacaggtaggtgcatactcaattcttcatcttttgcacagactggtgggggggtcttccccctagattcggtggagattcctttcctcaggacggaaggtccaggtggtgactgtggcttttgagatgatgatggctttgttctttgaaaggggtttgtcctgtgacacaatggccagcacttttgctagaggtctttcctgggtgaagttccaagtcagaaaggatttgaggttttgcacgctaatgctatgtgtcagctacattgctgtgagtagggcctagaagaagtagggaaaagtgttctggagaggcaggattaaaacattccaggaaggaaaatcaagaacaaggaagaacgtcattcctgacatgatcaggcagtaaatggcatggaaatttctggacagaaaggaggtttgtgggaaaactgagatcttgtatattaagaaatttttacttaattttaaggtctatccaactactgtcaatgtatttttctattcctgcctggtcgccgaggctgaaacatcacttactttctctttagcatgaggcagggtagatttctaaaagagctgggggctggtttgtcattgtagtcactgtaccttttcttggtcagtcaagaaaggcgttttgaagttccaggctagttttggctttctactgctcttaaatataattgctttcccctaagagtagagtgaaaatgctcttttttttccccctgtgagttgccaacaatccactgatataattgactgatggctctgtcccacacgtatttgttattttctttgcgagagagagaaacgtaaaacattctatttaacagtctataaatccagactggaaacataaaactcaattcaataaaaatattgaacatactcagtcttatcttaagtccaattaaaggagattaacagaatgaagtgggggctgggttaacagaaaggggaaaaagacaaaaaccatttcaacttcaacactatgtctaaggtctcagaggaaatgctctcacaaacacgagagaaatctataggcttcggaaatctttgaaagagacaaaaatactagaacttgtttttgaaagtgtataattctatttctatcatttgaatacacagatgttctttaaatcttctttctcttgcttttaacaaagagggaggataaaagaaaactcaaaacccagcttccccctctaaattaggaaaagtgtcaccatatgttgaaaatcacaaagcatcttttttcatgatgccatgtccccgtcctgtggtctttcatttcctccgaagacactgtgactcatgtcacattttcacggctgcagacacacctgggaattcttcttggtatttgtcctgcataatggggaaaattaagctgccacgtatctggctcctagcccgagcaagggctttacaccacccccaccctgctttgaaagggaagaaaatctgaaaccaggaagcactcctagaaactgcccaacatggtaataagaaggtgggttctcagccacgtggcttcctgcagtccctctgccacagccaaggcctgtggatcaaggttgatggagtcactgatttagcgggaacattcgtgtgtttttgagcgtgttcacagaagaagggctgcaacataatcgcttcttggtcttgaggtcctcccttttctgcatagtgtaggcattgcatggatgaaaagagacggccttccctcctggctccctgtggacctcagaacttgccttgtcagcttggggcggggaacgctgaggggcccagcttattgtgatggatgaaggcagtccctcagaatttcccattaataaggaggtaatagagtatatgttaattttacaagaacatgttccacagagcatataagtacatgggatatatttgaatagttttaatatgctatgattctcagaaccatgggaatgaaattctatttgcacctacctaataaacaacacattccccagcactactgggccctggtggaataagaggacaaaggtgtagtgtttacaggcacccctcccccaacacacaaacactggcacgtgctcacacacacattcatattcctacatgcatactcacagagctgtgattttgcctttgaaaggtgacaaggagcaaagacatttttcagaaccagatctggcctctcagtgttgtttcccaagatatatgtgtcctgtttcatcaccctcatcgctcaccaaacgcctggccccgtcgctgtgtttaacttcacagcttggctgccgaatgcgccaggctcttcatttgcttggaatccatcgatctgaccatctccctagcgccagtgccccaggttggcacgttaatcatcttgggtccagcattgatctctctcactccattcctctctctgcctctggtcctgaggccttccttgaccgctctgtctgtctgcagcacgggccaggccactgagagggtttctgcttctcagctctggttctctagctttgagggagcagcagtgagtgcgagggggactgtgtgcaccgcttctagcagagatggaaacaaagaactctgtggtcttcaacagcaagtcacgcccttggcagccctggcaaagccggctgtgaggaatgctggggttcccactctctctttggacaaggatgtttttgttaccttttttttcttttttagctaaggcttaccaagtgtcagacgtcttactaaacaatacacacacacacacagagatttcttattttcaaagtaattctatgatactggttttatcatcctcttcttacaaacaagaaaatccaggcttaaagcgatgagataatttgcccaaggtcacatgaccttgaagcttgaattagagcttgtgtctatctgactacagtatttgtgcacttaactgctttgggatgaaaattctatcccaaaagagcagaaggtgacaggaaaggaaagtctttggaccaccctgggctcgctcccctctagctgtgcagagcaaccaaattcttgactgctaggcctctctggacagggctccagtgcagccagcacagggaggtgacaaagagctgggcccagatttagaagaacccagtttgaggcctgcatctgttaccaatttgctgtgtgcccttgggcaatttattaagttctctggacctctcaacatgggacagaagcatggtagtgtaatactgcataagcttaaccagagaccaagtacctataaaaggatgctctgacaatatttaataattatcattacttgaaaaatcccctctcatcatagccttccaaatttctgaatctagttcttgatttttctaatgaggtctagaatttttgccaatacaaggaacagtttttggcagctttctgcatcttcacttcctttcaataccaagcctagtggagagcaaaattagcctgccaatcactcagaggcgtatgggccccaggaaattaaattccccctctctccagctgtctatccccagtgccaggtaccaaatgaacacgcgccatacgttgcggttcccgtgtcttcttcctatatgttaatttgataattttagtaaaataaaccaagtagatttgagatgtagttcattatccccaaagtcaagagattatagaatgccgtgagtcagaagggggccactgctctcttccattgttttttttttttttttttttttttttagattttaatatttcctttttctggcaacatttaaaagccactcttttacatctgttgccatcctttaatgacagacagaataaagggatgattgttactcagagaagctaaacaaagggactaggatcacttggcacatcctcgtgtgtggctgactttgaactcctggagcccatatcctccgcgcttctgctgggcaccagaggcagaacccgcggaactgcttcctgcagccacggatgggtacccaccaagccttagggagaaccgtgctctaaatgccatctgtgtttgccagtggcattcacgcgtcccctcctgtcctgcagggaaattaagaagggatctcctctcaaggctgacacctggagacagcggcttcctcttacacatccttcccacgcctcatctctggagtgagttatcttaatcctgacatttgcccagccattcagaatgtaaacctttttgtactacagggtaacaaatattttgggtaaacagtgattgcattgatgtggaaagccaagtagagatccctggcaagtgaaggataaagagctttgtccatactgtttggtcactgttatgagctgaacagggtctttccaaaatttacatgttgaagtcctgacctccagtaattcagaaggtgactgtattgggagatacttaaagaggtgattagggcaaaaagaggtcatatggctaggaccgaatccaatatgacgaatgtccttatagaaagcgattgggacacagcacacagggaggagagttcatgtgaagacacagagacgcctaagaggaaactgacactgctgacacattgatcttgaacttctaacctgcagagtgtgaggaaataaatttctgttgtctaagctacccagtctatggtattttattatggcagctctagcaaactaacaaagtcacaaaatgcattcatctagactcagtcccaatgtctgggaacaagcagaactggccgtgggccacggaaaagaggcaggcttgtgagacaaattcccaccccaccgtattttgcctgacttttgtcaagttcccatgttgatccccagtttccttatctgtacaatgggtatgatatatatctcattgctgttttgaaaattaactgagataaggaataataaatattttaagacacgcattgctcagtatccagttttgctgactcaatttctcttaatggtcataggaataaaaatacacagtaaatgtgatgttgtaatgtgtggtatatattaggctacatattcactaaagtcactgcatcagtctgttgtatttttttcttctggtaattggagacaacacatctattctgaggattcagtgcccagggctattgaattcctcaacccatggtcaagtgactgagtgaggccagcccttcacccttcaccctgcctatcactcctttgctctcagccttactgctgtgggagaagcagtgccatagaatatggctcatgagatgtccacaccctgcccctggccctgcctcctgtcttataattgccagagggttcctttatttcaatgaaacttacagttacaaacagctacggccagactcatggattcacttctaatgactagcttcactgaggaggagatcattgaccataatataccacaaatgcacaaggcgttgcgagggcaggagaccacctgactgcccccagcctggcctaccccattggagccatgcctacaaccacccctcacagaacagaggatcccagaatgaagagacatactcgacaaacacatgcatttctgacatcctgagatgggagatgcctatgatctctgggcagaggttgactgaaagccaagtagccctggatgacgttcccagagtccccgacccacaacagagtcctcagcctctctggtccacaaatggataagatcagtgcaacagagacgtccagggtcctggtgaaggactcacaaagctgcactcactaaaggctgatgacacactaccattccagtgggatgacttaccagggaggggggcattcttttccagctgtggctgggatcaacatttctggaagctgagctattgatctgtggctgggtgagtaaagatccaggtctcacatctgagcgattcagccccatgcactggggtctggggccgtgcagtgttctctaaggaactgacttggaggcctaggggaccctagcagaaggggagtgctttggctggccctttgctccattgccatggccttggtcctcacaattatgctgcaaggaagtaagtgggtttcagggctggcttattggatcttgccatcccacctctgtgccctacctgggattccttcatttaaaagcttctttttcccttaaagaggaggaccccaattctgggcagaatctacaaagcctgtggatcctggcctctgcttgctctccaactctgctcttccgtgggttgttcttgttccagccacctgggctttgccgtagtccttactccttctgcctagaaagcacttctgatccctctgttactgggtgaccctcagtacctttaataattcaaccgaagacccttccttgggaaagccttcctgatccccaggctgggtgctcacccttgaatccaccctttttcttctatgcatttgttttgctttgtatgtaagcattcattggtgctctgattccagctccccagtaggggagcagccccatgacagcaggtgatacaccttcttttgcccccagtgagcttcccagaacctggaaccatgtgagtactaatcctggtcatggagggacccagagaaagtttcctgccttacagcagtgagcaagtgttcagcctcgtgcttctctcaacaggaatagcccaggagtgaaacgtccctgagcagaccttgagactttgagggcttctcaccctgatctcaccttagaaccacccaggaacttttaaacccatggacgccctccccacatgcctgagattccaactcaaacagcctgggtgggcctgggcatccgcaggtgtctcctctgtgctaccaggattgggacccactgcctggagacaccctctcttcccactgctgggttttgattagttgaactccaagggcacctctcttccaagttaatagtcatagttgccacacactgtgcaatccacttctggtgccttgtgcggcttgagcttcataatgatgagagatagcttttgtcgttcctattttgtggttgagaagctgcagccaggggaggttaagtatcttgaacaaggccttgcaactcacatgagaagaagcaggatttgaactcatgccaatggaacacgagcctgggctgttagtgtctatattatatcaccttacgttcttgtggcagaggactttggaagcactttgtgtcatgcatatatgtgtgcatgtatatctacctctatctatctatctatctatctatctatctatctatctatctgtaaataaatatcttctacagcacttactatcagcaatgcctggatattcctaagtattcccaggtagtactactaattgtgagtggagattttaaaaaaaaaacaaaaaccttgattatatgttacaagtccctaagtggttgggctgtggcccctcacctgcttgtagctttgagtggagaaaggacagcacccgcgtggccaccgaaacaagctctcctggccctttcccctgttggataggaacaaggggcaggatataatgagtctaaagcagagacttaagatgactcctttcttcccccttctaatccccaatttcagacaaacatggggcccagaagtgagtgagggaattaaattaaggaacacaatttctccctgtcattgaactctgactaatgagtctatttctgggtaataagaaggagcaggaagtgacaaggcagtgtaatgaattagtggcccagaacctcgttagtcagaataatctttccacgaaaggtaaatgatgcaaacgttaattataaagccagggtggaaatgcatcccattatttggcttcctaagaaatctatcccagttattatgaggcatttcaaacaacaataacaataataataaagtaaggctcagtgagaactttagtccttggggagacttgttccactggtggtggccggtagggggagcacagctttctgctttcaaaaggggctggagcttggggaagccaccacgcccctctgggttttgtaccaggaaagatgcggtagagtccctgtcccggtttctctgtgccccgtagggttggtcattcagggctgtccactctagtcatccagatccagatgaggtgaggagtttaactagaagtttcccccatccaaagagagagagagagagagagaacaaggctgaggattttgcaggaactctggcatgttaaagggggtcagagatcaaaaccatggaggaaatagaggttaagaggtcaggctctggaatcagccaagctgaaaccctggctcgccatgattggaaaagtcccgtagcctggtttcctgctctgagaactggtggctaccagaagcatctgtttaaggaggtttttatgagcattaagtgaggtgtgcatgtgagatacttagcatccattaagtgcttcatagatgccactgataatgtgttttgaatgcagagtgaaggttgtagagctggaaggcatgttaggggcatgttaggggcattgaaggaggctaccttgttgcacaggtgaggggggagggcaacgtcactcagcaattcagcggtgggggcaccgaggcttccggctccaggctcaggtgaggctctgtcatctcaggctgtttgtcatagcctgggtttttggccacagcatagaagggaggcagcaggggaaagacaggaagctaaatcagtctcaagaaatgcagttgctgagaccattcctcaggagagcaaataaaccatattaaaactataaaaaagtatcctgcagctccgtggtaataaacttgtctgtgacttcacggcttagaaggtcccagcttctgaagatttgagcgatctcttgcccacaaaggggccggataagtcatttgctgaagggagagaagtttgaagcaaagatgctggcactctccggagcctccttccaggtggcgtccgattgaagcggaggctgggagctgcttttgttttgaaggctttgtcggtgtctgactggcaactcttggtaatgagagaagaaaaaacaattaattggaaatgaattttaattgtctctgactcctcatttgtaggctattaaaatgagttccctattaaaatatcacatcagctgcctcactccaagataacagaaggcgccccaaaagctcttctcctgccacgtccagtacccactccaccctcatcccctttggcaaaaagtgggctcggaggttttaagcaaaatgaaccaaagaaggaaaaatagaaaaaaattgctctcaaatctttcctttctttctttctttctttctctccctctctctcttactttcttccttccttccttcctttctttctttttctttctttcttctttctttcttatacatttatttatttttgctaaggaatacatgtctgcattcatgtagtattctgtggctgtctgtttcgttcccatttctgagtgctgtggcaacgtgggttggaaagcagggctccgctggagctgggccttctctgccagctgctcagtctctacctggaatggaggctgtagtggggctggggtgaggccaagggaaatggacatgtggtactggggcaggagacaaggctaggaggcctgacagtcgagggctaggactactgtgtccccttctcctccctgcctcacttgctcctctaccccactgggtcagggaggttcatttctcgacatggatgctgtccgagaggcgtagcccttcttggaggcctcagatctaggctaaaaccacctctgatgctgcccggcgaggtggctgtgtgatcagagccagccccttcccctctgctccctctgtgagcaatcctaggtattcactcagtagatgctaaaggcctggggcccaggaggctcccagggaatgtggcccccagccccttctgaaaacagacgtccttccctctgcttcactgtcggcagaggctcccctcttcctcctgctctgtcctttctcactccatcctcccttctctgtttcctgcccccatcatctttcttctgacccttcctcccagccctgtttctctccaagcaaaagcgccaggaattcctgcccaacaggctctgctcaagaacttgctaggaggcttttggcccttgcctttctaggtaaggtctgcactcagcaactttatggatgccaggagggagccattcctatctcccccaggcagaggcataatcagcctagaaggccagttccacccctagcctccctggggcgctatctggcgtctatactcatcctccccgcccaaccccatcactgcacactttatttatggaaggccagggacacctgtctccatccttctacattacctgcatattcacaggatccaccacagctcctgcttgcctgggccttgtcagctctgggcttgcagagaatgtggttgaatcagtgttagccctgggctggcagggcctaccggtggctgccctcaccctcctctgggctggcagggcctaccggtggctaccctcaccctcctctggagcccacgctgggctgggcatatctgcgacttggcagaggtggcaaatggctcagagccctgtgagaaccaccaagactcagcggtataggaagcagacgccttgggctaattcacaggccactggagagtgacaaagcgcccatcgacagtggtcgatcaaagaagtggcatcgaaagtggcaaagagaagtgtgtcccctgagctcgcctcagagtaatgacctggacgctggtggaggcaatgatatttgttggtttgagagctaaggcccctctgaaggccaagtcaaggtttgggggctccaaaccttggacagcagcaggtgcttggctccgggacaaagaggcctctgtcccggctccacctgagagcactgggctggctgttggctgccccctggctgcaccgcctctcagcagcagatggccaggggcccgcagcgtgccctcgctgtgttcctctccacgtgcacatccctttctctttgtctttctacacaaattgcctgtttctggagtggactcggctttccacaccatgggtccgggaggaccggccttcttggcaggtgtgggaggaacaagcctgcgtggtgctgtccctccctccccaccaggagcagagcagcaaggggacccttgaacatttcccctctggggaggcctcaaagcatagcacaggcccgaatgcattgagggttcaggcagggatgccagcgagccaggcttctggggccaggtgaaggcagaggcggcgacttgagcaaatgagcctcctttgaaggcaccgcacccccaccgaggacactgggcctgcttcacgaagcacgcgtgggcgtgtttggatgagcgctgtgtggctctgcagctccgaggaaaccgcatcagacaccccgacagctggagtgcctcaccctttcagtctccctgggattccaggccattctcttcggcctggcctcttcctattcacccatcagaccaggctcaaacccaccttgtcttgttcatggtgctgtaggctggcattaattgtatgacagaatgtttattcatatatatattttcccactagactctggtgccaataggaaagggacacaattctacttaggtatttagtactcctggtacatagtagggcctctgtggaggcttatggaattcaaatacccatggaccagccttggcctcttctttctggccttcaaaagaaaggctttgcgataagttctcccttaaaacagagaagaccacggtgccggggtgggggtggggtgtgaccgtgttccttgcctatttcccttacaacagagaagaccacggtgccggggtgggggtggggtgtgaccgtgttccttgcctatttcccttacaacagagaagaccacggtgccggggtgggggtggggagtgaccgtgttccttgtctatttcccttaaaacagagaagaccacggtgccggggtgggggtggggagtgacctcgttccttgtctattttaggctttagcctaaaaatagatggggatggagagggctagggagggcaggagggtcagaaaactcctgaggtttctggtggtaaattgtgagtacaacaatggatcaagaaggtgaccccagaacccttgctgtgtgcccactggggtacagctggtgaccaggaggatgctcagggctgcctgtgggctcctgagtggagagacttgaggttgaccagtccatttccactaactttgtaggatgcctaccttagaggacaaaggaggctggtggccttctctgagcagggcattatggtggccccaaaaggatcacagggccctttctgccagcccccaggcctgtactttgtaagaactgcaaattgtgtcctcattgtctgtgtgtatgtgtttcagtgtgtgtgtctttcttcttatctcttcatcatctgggtcacctgcccacctctggacaaagcttgcatttaaatatggtgccagacagtgacgtgatacagttagcgggtgatgcttgctgctctaattttgtctgcttttgggaactctgcaaaaatgctcttccatccctcactgggagcactgctggacaaatggtactaaagggacctgtaccttggggggcccaggtgacacctgagaccctctgtagacagcatggcagccctccactctctcggctctccttcctgaggctggagaacagagatctcacgtttgcagaagtccttttaaaacaaagtgccagaacaaggatttgacatcaccagtgagaaaaaataaattcatttttgcccacacctccactcccccgtctgttggtgtcagactctgatgggttgaaaggcggcacaaagagaaagagggtagggagatgatggcaactcggggagataattgacttcagaaatgctatgtcttggatgtaggaagaaaacaagtgaaaatatgttattttacaaccttgatacttctgacctcatggaaaaaacatacacacacagcgtagggtgagcaggtaggcaggaggaagggtcctagcacggggtgcgggcgccctcgcgtggccatgagaagtagtgccacacgcacacgttctctttcccagagaagcagacgtgctgcacaagtgcttggccaccgcctacactgaaactggaaagagctcactgaaaaggaatgcagttcataaaaagtcttccttctctacccaagacattcttgtcactcctagggctgtcattcttgaaaaggagaggctggtatagtaggaagaaagctcaatcctaaagctcagtttggtgtttgtggcttagcggctggacgtccttagtgtgtcttggcttgtcgcctgtaaagtgatcagcatgacctggatggtgcttctgcttccctgcagctgggatgctctggccttgaggatgctgaaacaccagagagctggccactcgctggtatcagtcgggcaagcgaactctttgtgtgggattgcttcatttcatttgaagtcattcattgctatgattgtagtctttttctggttcccatgaatctggtgttggctcagtgtaacagaaccagccttattgttcccatttgcagttacaagaatattgccattgttatttgcaagcctgatttccctgtctggttacctgtaatgctgcttctctgaaattctctgaaagacagaaaaaccttccccgcgggatataggttatcaggcacctaaactcattgcagctccaagacatgcatggattagggaccaagatgtggggctcatagtttacagaatttggtcttatattctccctttcatctggatcttcatacagctactcacttgctgctagaaaagaaagctcccagtgtgccagatggattccaaagtcccatttcctgcattcatcccaccatatttgaagactcttttcttttcaaatgcttagcccgggtgagcagacctcaaccttcgcctagcacccatcttcctgatcctgcctgagcttccagatccccagttccatctttactttggttcttgtataagacgaagagagcatttatcttttctgtttaaacccttgggatatttctgtttagcaagacagcaatttcgggcagctacactgttttattaagtatattaaacagcagagtagctcatctgttgtcgactggctttcttggctcaaacccaatatatcacgggtggttttcccaacacatttttaaattcttattactggctaggatatgatttcacaaatgttattataataattcattagtatcttacataaccagtaatacagactgaacctttgccaaatgcattgttataactttttggaatggtggccgcattaattaatcattgcttgttgagtgcctactatgagcaagagaatttgcatttttgttctttcatttctcatgacagcccaataagggaggtaggattatctcattttaaccaaaggagactctgaggccgagggaggctgagcggcttactcgagttctcgcagctgctatatcctagaggagaccaaattcacacccagcttggactccaaagcttgtacatttctcatcatgtgaccctccacccacagactgtctgagtacaaaattccacagagggccttgacttagaagaccctctgccagcattttgtctgtggttttgtgtgtcgtctcagatgaaggtgactcaagacttcaggcagaggatgttttccatttaaatcccctaaaagaaaatggccctgtttctagaagagagaaaagcccagacgtctgcttgactttgcttccaggggcaaggactggggtccagatccataatctgggagagtcttttatggctttcacctttggtgttgaagaggactggcaagcaaaccccttggaccaatggtttcacccttggaaacttagctgggtaggtccatgtcaccatgggactggactgacatttagccagattttgaaatgagagacttgaacctgaacccttgcttttctcttctggataatttgatttttagcaagaggctgttggaagacacaaaggtccattttgtctcaaaacaggtgaacatagggaagagaaactgaaaagggaggctttgggagcacataactgttttcagatatttaagtgctgtttggtagaaaaggaatgagatgttttctgtataattacataaaacaaaaccaagactgatggacagaagttatttgggagcaatctgttcaatataaaggaaattttaagggtctaagctacccaaagaagtgaagggctgcgttggagtttttctagcactgagggtgtgtgtatctgtgtgtgtgtgtgtgtctgtgcctgtgtacatgcgtgtgcgggggtatgcctgtgtgtgcgcatgcatgcgtgactgtgaacctgcatatgcacatagtggagggagcacataagagacagaaggttttatcagacgaccttcacaattccatattttcaggaagtctataattaaatgttttaacatgggccttcaggcaccacaattagccattggagagacagatttgctcaagaagtctgcctggtgcactttttcttcgttgaaaattttaaaccttcaaaaatgtaataaaagtagtgtattgaacagcttccctccatatttactatgcaccttctaagaacaaggcgtcttcttccacagccacaacacaaggtatgaattccagagacttagcccagatccacttcagcctctggagtagtctgaataatgtccgttattacagtcgcctcacgacggacctgtccacttagctgcgttctgttgccatatctctttagactcttcgtatctggagcagtgctgttgcctttgtctttcctgacactgacatttttgatgatgacagactgattggtagtgttgggcacttttcagatgttgcccaaatcaccagcagctagatctgcctctggcatctaatacatatggaaaccgcacggtgggataggaggaactctgtgccctggtggcctcaggtccccgagccctgccctgcttgcaagcacaacttatgtgggaggcagtgagtgccaggaatggatgctcaaggcctgaagtctgtcctgccacttcaggccatttgagtttgcgcagatcacccgcctcccgtggaggtccacttcctcttctctgcagtgaggacctttcgtggcagtgttgggaatgacatggcatattacaggtagaagtccttaataaactctagcaaagtgctagaccaatgcaatcgtttattatttatttttaacatatcagcgaggtgcctgaagctagaactgcatagtgagattgaaaaacttgtgaggaaaactatggggaaagatgaaagccaggctggccaggcaggacggctgcatacgcagccatacatgaccctgagctcctctccagttgtcaagtggtgatccctctgtgcccacttccaaagcctctggtaccagcaatgtccatggcttattgagcatttactgagggtcaagcgctttgccaagagaagcccaaattctcataagaacccagaaagttcctatgagcaatatgttaagatgcagagatagagtttcagagaggttacgccatttgctcaacctcatgcagtcaggaaatgtcaggactgaacagcacattaccagcgccctgcagaggcctggcatccttgtcccctccactcctcctatgccatccttggtggccctataacacagagccttgtgacacacagctggtcagcaagccctactataaagtcacagggttgatttgaatctgcaagtgatcagctctcctgaagcaggaccttgtctcttcactgatatgcagatgtatgctaataggctccagagtcacccttccctccaccaccttctcagctttatttatttactgacttgatgaagtgaagaggctggagaactaaggaattcatgagcattgcagcttccggggcccctggtaacaaactccctgtctcccttttcctgcctggggcccagactggaccggggtttgagggaggagagaacacaggtgcctgaccatgtgctgatgaggccctggacagccttctaagggcacaccctgggcactcgtgagttgtctccatgtgggtttcagtggggtctggtggctggatggcctgaccatcacaggggtaggtggctcagccctctggctctgggcagtgcccaggtctggcccagcgctgaccactcagctttctgctctctggtatttctgctctattcaacacagaagccatgagggcagctgaggccccaagggcaaggtcttctgagtcctgcttgatcatggcagagaaagaggagcatttgaaacagatgcccttcctcctgtactccctctcccagtgtggagctgtgagatgcaggaaaggcctgactactggggctaggagttttagacattctactgcccaatgctgctacatgtcacagttcctcaagggcattgctcttttcttccttctctctctcttcctcttctcccatctctttctttggcaagagctcttggagctcctgtttcttttccaccttggggaagaggttgtcactggatctgtccactttctatgactgagcctctcgtgtctggacttctgacgctccgtgtgaagcagaggcatggccagaagcgaggctagaacaaggctgtccgggacggggcctgcacatcggtgcatggagagagagtggttcaggagccccacaagcagctaccttcggctaacacgtccgtcttcttgcacacagcttcctctgacatcattttatcatagttattgcagctatcatgttacatgattgcttttaaaataaaaaatatctcatttctggagaaagtgctcacagagagcagctgctgcccctgtccactctcttctccattcatgctctgtgcccactcagggctggaatcccctctaggccaccgtcgtttgctccatgatctgctcacagatggaagtcagcccccctgacatttgggaatctgctgcctcccacatcagaacctgctccctccagctcttcacccatctcctcccctgtgcttgagtccagatagcctccatgtgcaaagacacagaagggcgttccatgcatgaaaagaagaaagtgcaatggaaagaagtagggagggggtgcctgtggagtcaagcccaaactctagatcaaatggaggaaagggttgtcatcgtgcctgccaatcccaatcatttttacggcctttagaaggtactgggttgagaaggattccaaagccaagtctgggctccacaagataggcagccgtgattgattgataatgtccacttctgggcgtggacacagaagtgcgggcatgctgcctgcccagctttcagcggtgcctttcccaggagctgatcgctgtgcctctgattatgcttcttcctctgccatttgtgtccagtttctcccatttccctctgatggcttctagataactagtgccccctagtaaggtagtaagaaatattgtaaaaatgttacagcatctgtatcgcttgaaacttctttgaaatgtaaaatcttgggtctcaccacagataatactgacttggaaactctggggtgagctccagagagctgggttctgacggccctcccagtcaccctgatgcaggctgacattgagaaccactgtttgttaggagaattttgaggcatgggctttccgatggagaaggctagtgctgatgtttgactaactccttttttgtttttaacaaagtcatgcaaaggtgaatctactagtttaggattctctgagtgaagcgccttgagaaagaatgatattttatagcaatattcagcggcagatttttatcgagcttcagtaaatccctcctggacaaggggagatgaggctctctgggtgactgcaagatgtgaacccagacaaagacagtccaggagccctgaccccccatccttctctggtatttacgtctctgtgttggccgtcacagcaccttgccctccctcaccaagggctggcctgctcatgaaattgacattttggattttaccaaaatgaatcggaaaagataccagatatgggctgttagagaaacatgggaatacctaataacatgaacttttctgtggatttgagcacatctatgtatgtgtctatgtacttgtctgtgtatgtgtgtttctgtgtctgtgagtgcctgtgtgtgtgtgcgtctgtgtaggcatgtgtgcctctgtgtctgtgtgtgagatcatatctgtgtctgtgtctgtgagtgcctgtgtgtgtgcacgtctgtgtaggcatgtgtgcctctgtgtctgtgtgagatcatggctgtgtctgtgtctgtgagtgcctgtgtgtgtgtctgtgtaggcatgtgtgcctctgtgtctgtgtgtgagatcatgcctgtgtctgtgtctgtgagtgcctgtgtgtgtgtctgtgtaggcatgtgtgcctctgtgtctgtgtgtgagatcatgcctgtgtctgtgtctgtgagtgcctgtgtgtgtgtgcatatgtttgcataggcatgtgtgcctctgtgtctgtgtgtgagatcatgcctatgtctatgtgagtgcctgtgtgtgtgtgtgtgtgtgtgtgtatgtgagcttgtttctgtgtctgtgtgtatgtctccctgtgtgtgtgagcgtgtgtgtttctgtgtctgtgtgtgtgtctccctgtgtgtgtgagcatgtgtgtttctgtgtctgtatgtctccctgtgtgtgtgagcgtgtgtgtttctgtgtctgtatgtctccctgtgtgtgtgagcgtgtgtgtttctgtgtctgtatgtctccctgtgtgtgtgagcgtgtgtgtttctgtgtctgtatgtctccctgtgtgagcgtgtgtgtttctgtgtctgtgtgtatgtctccctgtgtgtgtgagcgtgtgtgtttctgtgtatgtatgtttccctgtgtgtgtgagcatgtgtgtttctgtgtctgtatgtctccctgtgtatgtgagtgtgtgtttctgtgtctgtgtgtatgtctccctgtgtatgtgagcgtgtgtttctgtgtctgtgtgtatgtctccctgtgtgtgtgagcgtgtgtgtttctgtgtctgtatgtctgtgtgtgtgagcgtgtgtgtttctgtgtctgtgtgtatgtctccctgtgtgtgtgagcatgtgtgtttctgtgtctgtgtgtatgtctccctgtgtgtgtgagcgtgtgtgtttctgtgtctgtatgtctgtgtgtgtgagcgtgtgtgtttctgtgtctgtgtgtatgtctccttgtgtgtgtgagcatgtgtttctgtgtctgtgtgtatgtctccctgtgtatgtgagcgtgtgtatttctgtgtctgtgtgtatgtctccctgtgtatgtgagcttgtttctgtgtctgtgcgtatgtctccctgtgtgtgtgagcgtgtgtgtttctgtgtctgtgtgtatgtctccctgtgtgtgtgagcgtgtgtgtttctgtgtctgtgtgtgtatctccctgtgtatgtgagcttgtttctgtgtctgtgtgtatgtctccctgtgtgtgtgagcgtgtgtgtttctgtgtctgtgtgtatgtctccctgtgtgtgtgagcgtgtgtgtttctgtgtctgtgtgtatgtctccctgtgtgtgtgagcgtgtgtgcgtctgtgtctgtgtgtctccttgcgtgtgtctgtgtgtgtgtcgtgtgtgtgtgtgtgttctcaccctcaccctgtggctagagaacccggctaagtgaaaagcaattggtaggctgagctgaccagtccttccaatctcaagtgctgtctctggaaaaagtacaccgaggacccagcccctagggctgcaggcagaaccgacgcacctagtgacacctttcacccgccctccacgggcagtggctgggtcatcactgggtcatctccctggcacgagggatgcctggctgactcctgcaaggtctcacccgttcctgatctgaacgccttcctctgtgagctactgatggaggcagccctgctggcatgctgtatagctgaggagcctctggtttccttcctggaaaatggggcaatacctgcctggaaggctgctgtgaggactaatctaagaatctctgtacaaaaacagcagctgtggttgcaggccacagggggtgttctgcaaggaccccgaaggacccattcagaagagccttcacctgctcctgctatcctaaccccatcggctgcagggagtcctgggaggctgagggccctccctcctcgtggcacgcatgcagctgcagagctggagagcggagccctctcctctgccagcctgctcaggactgtgaccctgggtggggaccagggagcctgccggccttaaaccctgcaaagtagaggagcccagcatgagcccggttctcacttcccctgcaggccactgacacggagagcgggtccttccttgttactgcaccctgagcgcatctctgctgcaatttgctctcagcgcctccactgaaagttgcctgcatccattcagttctgacagccatatccgaaatcagctccctctcggtgctggatcccctttggctcctggaggcccaagagaggggccgacccagtacctactggatcacggtggcagccgctgtttcctgggaagcatgttgcgcccacactccctctgcacattttacctaccagccgggactgagatgtgaaatgggatgagctggaaaaggcaggtagatgtcgtacacatcccaacaccagctccccaccgttctctctctatcacgcaagcacgtgcaaggacgcaggcccataccactttctaggaattctgtggcgaaaataacaacccacagtcatctgcacagcaattattattcattataactgaactttccctctaaaaccgaagcttccctttcttactgcaaaacccaaccagaaggtctgcatgctttattcctaatcaaaagaagaatgctaacacctccctggcagagcatcactctccgcgcttcagcagcccctggctttgtttctctggtttttgctcctctgaagtgaggtgagaaagggactggggatgtgcacatcacaggagccccttcggcagggctgtctgcagcggggcactgtgcagggtgcacgggaggaggggaaacaacctctgccctccagctctggtacctaagtcccctcttgggaaatgaagggataatgcaataggctccagaaggaatctgaccaggttgatgccttaggagctgagagtggaggtgaaggggaggaggcacatcaagggggctgatggaccctaattgtgcatgatagggtgggtttgtagttgcagaaatagaccctggatgtgtccgaggttcactctgtcaatgtattcacactaaacctgccctgcagagggctggaacgtgaataaaaaatcctatcatgattgctctggagggggctggcacgagtgaggcgacctgatccccacgtcagcattcatgctcatattttggggtgatgcagggcgatgccaaagagcaggtggctggaagttttagaggaaggtcccctggggggcactctgggttgtcctttgtcattggagctgatggcgtcctaggctgacttctccccggggtcttcccagccctggtgcgtgttgctttgtgaggcgctgatctgctggagggtgggatgtacttgcacttagaaagggcgttctgaagggcaggcggtggcaagaggttattgggactgaatcaaaccccacttgctttggagttcagcagagttgggttctaattctaactctactacttactggctggccgtgtgaggagaattcaagatcacttaacctcgcctaacttcattgcttcattctgtctgtggaattgggagaaccccctctggattttgctgtgggagtgaaatgagctcctgtgtgtggggctctgaggcacgggccccggggagagcaacgtggggtgagcagccttcaccacgaggacgtcctgacgacagtgactctctctggctctgccaacctgaccacagcgatccagggaggatcctcctggctgggtggcaagtgacgtctctgagattataaagctatagtcacacaccccctccccacctggaaactatagaaaggcagttcccccacactccctagtgggtagcctgctccactctgcctggaaaccttttctcaacagcctctgagctgctggcagcatcccctggtgccctccccagcctgcagcttccagggagctgggaggagcatgcccttggactgtctctgtcctctggctgacacagccgcttcctttatgtaggacactggcccctcatttgctcagctttgggacctgcaggtggacatttggcccagtcccaggctggaggccctgcggctttcccaggccagctcatcatgccacctccctgcctctgtttgagaagcctcctttccctaacattcctgcattcctagagagcagagggcctctggaggcagcagtgcataccctggccctggagatgacccgtgcaagatacaggctgggccaactccttgggactccatgtctccagctgtgtaggacaacgacactcccagccccaccatggtgaagagcctgagttggaggtgggcaagaagaccaagggcatgagtgagcctcaggggtgagtgagcccccactagggtgaacgtgaatctgttctgtggacgctggcccagagcccagaaggaagacccactccgagctgctcagggctgggataggaccatctaggtggaaggctcaacccaagaatgagctttctagaaattctaagttggagtgaatttttaaaacaatagcttccataggtgtcatgtgtaattgttacaaagcccctgggaagagggattaatggtggccctttgagatccttgcagaagcccagcagttgggcccttgacaagaacaatcagcttggggggcagctagcactgcccaaccccagtcagtccttcctgatgcactcctcaagccagatgaggctccccagccagcatccatgggaagcagctgggggctcatggagagtcgggcatccatgggaagcagctgggggctcatggagagtcgggcaggcaggctgacagcactcagacttccccagaactgaatggcaatgtggggtcatggcagtttgtctctgatcccgtctgtttctgaccctctatttactctgctgcaaacacattggcctccatcttcagctggtcccctgtacgccaagcacattcctgcctcagggcctttgtgctttctacttttctgctggcagtgctccgccccctcgtagcaagtgaatagctccttcacttcttatcagaaatgcccgccaatcgccctatttcagtagacacagagccacagcacactctctccttacctttttttaaaaaaatcattttgcttaaggatttcaatgtgacatagtagcattcacttgtttatttgtttagtgtcaatctacctccacaaaaatagaagttccacacgagcagggacattgttttgttcactttttcacccatagtgtctagaatatcggcataaagaagacactcaatatataagtttttagaatcaagtcatggtaactagagggtttttccagctctgacatcccacagccttgtcctacataagaagtgctatcctgggctcaggatgcttacaaagaagtctggagttggccctgcctcccaggatcttcccatgtcaaaggagtgggaggaggaacacataaggggctaaacagacaggggctgatgagggtcccctccccagtccccaccagagagctacaggccacaggccacagaccacggtctcccaggaggcctctctcagagcaggctgggcctgggaacttgctcaccatcctgtcaggaactacagttgaccctcaaataatgcggtggttgggggtgccgaccccttgcttagttgaaaattcatgtataacttttgacttctcaaaaatttaagtcctaataatttactgttgcccagaagccttgctgagaacatgaactgtcaattaacatggattttgcatgttatgtgttatataccataatctcacaataaagtaagctagaggaaagaaaatggtattaagaaaatagtaaggaagggaaaatgtatttactattaatcaaatggaagtggaccatcataaaggtcttcatcctcgccatgttcaccatgagtaggctgaggaggaagaggaggaggaggaaggagaatcggtcctgctgtctcaagggtggcggaggcagaagaggaggaggcaggaagtgcaggcactcttggtgtaacttttactttatgtggatccacgtataagtggatccgtgcagttcaaatcatgttgttcaagggtcaaccgcatctggttcagaaactcctctatgtgcccctcatggctcagtcccacctgaatacggccataacgaggctggccgagaggcacagatcggaatggggtcatttcctttgatttcctttgatgttttcaaaggtagaaaataatttcgggccttttctaagaagcacttagctgtgggctggaggttggagaatgttccatctgctggaaatgctaattagaggcaatcataacccagacttgacctgccagggcacactggagtgaagcggcgccctggtgggagggtgtgggggcagcggagcccaggccgcagggccacgttctgccccagttcgggacaacctgaactgctggactcagagacagcagggactgagctgggaaacactcacctcacttgcgggtcaggactcaggggcaggtcagggctcagtcccagggcccctccacgtcatgcaatgcttcccactgctgttagaaagtagcaaatgatttcactaaccccatgttccaggggagaaggaaaattgtacctgcatgaaacgtgacaacaccgtcacgcgtggtgtcagctggttgacagccatttgcaccctcccagcgcccctcccaccccagttgcttgaatgtgatctcgctacccagagggatgcctgccccttccaattgcggcttcgggcagggacacgggacatcagtgctgggtgactctaatgagggctgtaaggtttgcgacccgctgtggcctgggccttccagggtcccggcagagccctctgctcctcagaccatcaccggcctggccccaggctaggggccttcatgggcgtcagcgtggggccggcgtcccgccttgcctgtcttccctgtccacctcaccttcgcccccgggggtggctgccgagtggggcagccacaagttacttgaattagtgccgcccaagtgcctcgggtgggagtgggggatgctgcaagggacgcaccgaaatatgaatgtccaaggtttgtgctcctcaaagaacaaaaccattccacaggagtgccactgggagagggacaggcggccacaggcgagggggcccctgggtctggtggcggaagggctgtgaagtcccgctgctcctccctggcctctgctgtagatctttggatggtttccaccccgctcccaccccacgtatcctccagccccacactcacatccccttggtgccgaatgtgtcctagcaaagcaatcagtggacgtatttttaaaagaaaactcatttaccacgcaggcctctggagtcgttgatggaatagccctcctctgaatggaaatagtggtgtgatagcctcccaggagttattattgcactgacactgcagcaggctaataaaccccggaggggtgcgacgcgcgctgccaggcagttctcacatctggatgaggagccgcagatgccgcgggggcgcgcctgcagctccccagaacggccaccggagggcacccgcgccccccgagccgcgaggctgcctccaccgagctggagaacaggctcccggggcgggggagggcccctctcagcggactccagacaggggggaaagcagcttgcccgtcctccttccgtgcccctcctgggtttctgaaagcgggtttcaaagcagggttggaaggagcttggatagcacacgccactaactcagaaaaaccttgttaatggttactttgaaagtccatgaaaaatgccttccaaacacatcagaatgggatggcacatgtcatttctcttttggagaagtcagtgagtttagctccaaaaccccaaaggcgttaagagtcgcggctcctccctccgcctgctgctcccaggcacacgctgggcaggctcttctctggctgccccctctgtgccccgggttgctcttgccctgcggcagcgcctggcctgtcggcttcacacccccagtgactgtccagcatctaccaggcagcagggcccagttcatgctgtgggttgagcttgatgctgcttcttcaggggtgggggtgatgcgtgtgtggaagacaccagctgctcctagagatcagacacccaaaccgtcagtcctgctgtctggagcaccattttgaaacagaaactaggaccctcagaaaatattaccatcttgcagaccaatgggcaggtgtcccatccccgtctgagatggtgtcacccctgctcagaggcctgtgaagccccacacattgtagaggtgtttccttaggattgttagagccctggtgcgttctgcaggacacactcttagttagctagttggtttttaaaaatgcatttagttagttttaattttacacgtgcatgccttcagtgaaaacgagagctaccaataaattggatgtttgttaaggaaaatccccgcagcccccgaggaaggaaggaacactctccaaggatgtctccctacccggagctctgctttttacttgtgaggaccgagccccttctcctgggagccagtgcactgcctgtggctcagcatgaggcagcggggagggcccaggaccagagccaggcaggaacacaggtggcccggcagggaaggctgctctggccctgccttgcctccccacccagtattgcccagcccctcagaagctagccatggtaaaaaggcttggctcaggaggggctggaaggactgagaaaggagaagggtcagagccagggcagagtgaatctgtgtctcttctgatcccagcacaggacaaaagctctttagaaaaacaactttcaggggtttaattcaacactatctcagtccctaggccagactcatgagattcatcccctggaattcagtttccccacagatgttgcttttggccccattgccctggaagcactcagtccttcacagatgttctgaggacaggtggaggtgaagtcctttaggaggggctggctgggcctcagcagccttctgagaggacggaaaacggaaggccagcaagggtgccatggatcttgggtcctctctgtcccatctcccctcccataccgcaggcttggactgcactcctcagaaggtggggtcaaagctgttctcacccttcctgctggcagctggcaccccaggccacctcctcccactcttgccacctgccagccttccagagagactcagcaataccagttattactggtcgtatacctattacctgggtagagggattctcatttacacagttggctccctcgtccacatatgatgaaattctatgggataaccctatgctgttgtgttggcaatgacagcagagaggacatgaacctggtggtctcacaggcagagacccatgttgctgaattcatgatgagatctcatgatcactcatgatgagatcagcacgtctctcccctcacacgtctgtccctgagctcacctatttgtggaactgggtagaggagcacaccaagatggcagagaaggcctggaatccagatgagaggagagaaaagtatgacacgcagcgaggcttccctgaacaccttggtgcaactcacacattcacagatatttcattaggaatatgaacaaaactgtcagaattccagaaatcgaggggcaggcattctcccagggggatgcatgtagcaggtagagatgtgaaccccagtaccagaagaggtgggcatgacacacaaacaccccgagatcagatggcagaaacccggcccaagccagcccagcgcacctagtcagttcccggggactgtggagatgctgcacgggctcagcgcgaaccttgctgcacgggctcagcatgggctcacggcagaacccaagcacccaggggactccacgcttacccggaagggaaagcgttctctgccctcagaaacatacaccgtggacgctgccttgtacggaaatacagaacacacttcccatctgcaaggtgtcagagcgcggggcgcggggcctgagtgcgggagaatggctggaagcagtgagaagcagcctggggtccaaggaaggcaggacgtgggtgctaagcgtaggccgtggcccacatccttggggaacaaaatgggaggattcctccttacagtttgggatcatggagcagagccagcctgaggcacacggcgggtgaagacggggctcagaaggaagctgtttgtcctgtccaccccgtcacttccccatcagagcggagagaaatgtcaaggggcgggtggaagtggaagctgccttgatcgaaacccagggaggagaaggggaaatcctcagcgagggcccttggagcgggtggggagcaaggggctttgatcactcagcggggccttgccctttctggaagggtgtgcggtctgggtgggcgagtctcagaccgcagaggatccggcgcctgccccactctggagccggggagccctgggctgtgctctaagcaaagcctgcagcccccggagggcgcaccaggggcccaggccacccccggccctgcacccacagcctacggcccgtccccccgcagtgccagggcggttccttcagtccttgaccttcgcagaacgtagttcagatcctcaggcccagcaagcgcccctctgttggcggccgggggccgcggggagttcgcccctgtgggtctgggcccaaggcgctgcccggatgataaggcagcttcttcggcggccgctccttttccgccccgtgcgcccagggagtccacgtcacgaggagctccgggtccaggctggccgagccgagagccgcggggcgtgggcaggcgtggaccccacaccaccttgctccctcctggccccccgccaaggcgatgtcgtcgcctggactccatccccttgtcttccctgaaagcccccccccgacttcccttccatgtccttcactgttttctctcctccttctcttccatgttgtcttctgctgaatataaaccccacagcgggtaaagatggcaaccccagggcgcagccaccccgcgctcccgctcggccccgccaggtggcgctggcgcgttctttccgcggcgcggggctgagcggagcggggctgggctgggcgcagcggtcccggggctgggagggaggcggcgcatccacacagctccgccaggtgccaggcgtctttcgtgtgtcatgttactcattactcataacacgaacaaaacaagactgctgggcgaggtaaatatcgttagcttttctaaatgaagaagttgaacactatggcatctgatcgagaaaaaagagggagctggaccccctcctggatgggactgcgggcaggcgtgggaactgtcatcaaggcatcccacatggcccctaggtaagcacgagtgaaaagtctcaaagggaagggaggaaaaacagaggaaacgggcagggagtcacaggctgacacttcgcggttctttacaacctcggtctttctcttgtccttccactctagggcttgaaaccttccctccaggattgactctgatgcccctagaccctgcctacaagaggtgccacctcccatgcagacctctgggtgatgctggcacagggctagtccatctcccatgcagatctctgagtgatgctgacacagggctagcctatctcccatgcagatctctgggtgatgctgacacagggctagcctatctcccatgcacatctctgagtgatgctgacacagggctagcctatctcccatgcagatctctgagtgatgctgacacagggctagcctacctcccatgcagatctctgggtgatgctgacacaagcctagaccatctcccaggcagatctctgaataatgctaggtcctttttgaagaaactgagagagaaagagaggggatagagaggagacagaatgagagtagacagaggaaagagagagcgtttccattttggcatctgggccaagaaatgcagccatataaaactgttcttacctaagctttgatgtggcatcagggatgaaagtgccttccctagcttcataaaggatgtcacacaaatgcagagaatcaggcaagaacccaagaaaccaaatcacccaaacctctgtgtgactccttcagggttatagaccctgaaagtaaagtcagaggcaaaaaaggggttaaaaaggagactcgattgcctagtgattccaggaaagaatcaaaggggtgaatgtcactgagcattcagggttagtgtcagatgcttcagccaagaaatcgcacggcaggtcattaaatgaatttagctgggattctgggttttacattgtggttaattaatctatgtaagtatttatagtagtaatggcagagcagggaccatcagccaagacaagtcattagaaggccaagttgggcaggcctgcagatgggtggggagggttgggactgggagtttggccttgcagggaatcactgtgttctgggcatgggggtcagggcagaggtgggctggggaaattcacaaacaatcccagagctcaggagtcaacaccctgggcaggctgactgcgagtggggcagaggctgattcaggggattgctttcctctttcttagttgttctgtctctgtgagggatgaggaaaaaaatctccagctgaaaaatgtcaccttcaacctgacactggagccagaacatttacaaatctgcctgtcaccatgacagcctgacggatagcaaccttagccgggacggagttaaatcgccaggataagtcttgcaaaaagttttggctcttaagatttttatcatcaagacaggttaaggaatggggggcatggcttccaaacacgaaggagactcaggccccgtgcctgacttcccaggaaatccagcagctgcaggattatctattacctgaggggaggtgacaggagaaaattacccagcaccagccccatctgttgctgagcaccgtttatttcaccttcacttaattcacttggtttgtcatttttcctttgtctcagtgtcatccacccaaatcctatgtatatatgccctggtgttcccagctgggcattgtggctgcagagacaaagcctcgggtatcttttcaatgagctgcagtcactatggagtgtctctctcctcccctctccactgtcatttcctccataattgattagaaactggaagcgagagaggagaagctgcttttacagcctgggtctgcaggtggaagcacattcctgtgtttgacttcgtctctggagacctgtctctttcaggaagaggtggaagagtatacatgaagtatagcagacttgtgtcactaggagagagattgcaaaatctgggctctcacactattcttggatgcttggtcacccacctctccccgactttcgttttctcctctgtcacatggatctaacacttgttctcctccctgccaaggttgctgtgaaggctcaatgagacagtatttgcagatgctcactacatcatatagaggcctattcaatgagaacatgcatttaaagcagttaatggtgcctcgcataggagaattgttcaataaggaccattattattagtgagaatgtaagtaatagtgatgacttgttacccttgcagcatctactcttcctctagttctcaagctacagaccattttcattcaacatttattcagtctccacgggcagcactgtattctgtcttagggctatggtgattttttaaaatgcaaacaaaatgccattgctgggtctagaagctgagtctggtgggaaaggcctgtgacagagtgggaagcagggcttaggtctgcacccagctcagagtagggggagttgccggagaagtcctgatggagaaagtgacatccctctgggttctgaagagcttaagccacctgctcggtggcgggaaagggcgtgcaaggctgaagcgggaagtgcagtgaatgagctcaggcaggacagggagctgggcctgggaaccacgggctggcagtacctccgaaggacggctccagagccgagactggacgtgtggacagaggagctctcgctgaaggagcagatttggttttatgccaagaccatgagctttgcggaagggcataaaggcttttaaacaggatcaggtgagcctgatgatcactcaggattgggtggggcgtgaatgcagaggaaagatcagctgacaatgtaggaatctggaactcgcagagaaactgcctgcccttgggactcgctcagcgccctcgcagccggaatggggcctgggaagggaggagccccagcagaggggcagtcggagagccatgaaattgcgacctgctgccaccagagggcagtgttggacgggctgggaggagcgccgccgccgccgggagggtgcaggagagagctgtctgccaggggaaacgcacgatgcgttgtccaggacattctcacctgaaaatgctctgggccacggacaggctgaggattttagtacccacccccccgccctgaaaagaaaaatctctgtgacgagataggcactgggtttgtataagaattcagagtgtggccttagtgtcttggccaggcacccagatgccacctgcacacctctggcttggtgttggttttattgtgcttgtcctaaacctagcagctccccctgagatgatgtcaaagactggactgggctagctcagaaaggtttcctgaacgaatgactttacgcaaaccttcatgccggcacatgttttcatacagattgtctcattgaatttttagagtgatccgatgaggcacatattcaggttttataaatgcaattcagagaagttacatgattttccaggaaatgaggttgtcgggttttgatccaatagctcagactctttcctctgtacccaacaaaccttgtcagtctcctttgtcctttgaagtggggtgtttttctcctccacaagtgtcaaatctgtgaatagagcatgtttaggagcaacttcaccggcatgcccaccttgagaactaggggatggagcagcgggtcggatggagaaccagaaagattgagcatttattgtaacagaggtcttacatggacgtttcccacgtaatccttaaggcaaccccatgggtaggattatcatcccaatattccattgaggaaagaggctcagagaggcaaactttcccaaggaaacacagctagtatatatcagaggtctatgtcccttcactcctgcgctctggactctgatcctgtcccaagagtgacagcagctgcagtatgtgtgccgctcaaaggacagggctggagtgcatgagaaaaactggacgtgtggtgcagaaaggtgcatgtctaattatcattgcaaacaactagcctctcaacagaaagtgttgttgatgtgacagacatgaaagaacccacagccaaagggagccggcccccaggggaaggagggcgaattgtacttgggacaaaaagagctaacagcctcggagagaacaaatgtccttggtagtatggggtgtggggtgatgttgggtgttcattgtcacgtgatgactgtggaaggatgacacagcacaggacgcacccggggaggccagcaggaaggagagttgagtgcaagtccgggaaaacaaggcttgatgatatgcttttgtatgggagtctcaagttgcttgagttaaggttgtctgggagacatgagttacaccagcacccagcaccattacttactaggctccaaagaggaagacatatcaagttgtaggggccttcccttctgcccacaagcctggatcagaccacacaacattgtgtttccattttccatatggattctggactctttccagagagtcattctttctctattagtccttttctttcgtacaccctgtagctaagtgaccctccactgtacctaacctctctgagcctgattctcatgtgataaatgtggatgatactgctctcctaatgtgactgctatgagaagggaaagaattggcataaataatagcaattagctgaggcaatggcccatgttaaagccaaataaatgttggttttatctcttgtttcacctttgtgtctcaaacaggcacacccacgcatgcacacacacacacacacacacacacaaggcaaaccacaacccttgccaataaatctatgctaagtcagagttaacttagaaaatcaacatggtgcagaggcttttaaaggactgacattcctcgggttatggaaaacaataataataaatcttaaggaatgtcaccttgcccctggcactgaagacaagaacccgtttcgttagtggaatagccctgagtatatggagaaaagcgacagagatgatctgttcacagcaaggagagagtggcagtttttagacgaagccggctgggggcacggtggaattgccatgtaattgtcaggctctttgcttattaatttctcagatttcctttcaagataaggacacaaggtaagatggatgtgaatataataagcacagagattacagtcattacaattttagaatgaactggaaaatgtggacacatcagtctgcagccagtcggatgggtctctcagagcctcttggagaccactgagggctgcggcctgtgccataagtgtggggcaattttgaaagccttacttgatctaccgttgcagcttcatccagagtactgtctgattgttttacatattggctgattattttccatgcccaggacctttggtaaccttggaaaattgttggccctccattatctcctcaagtatcacttctcagccctctttctgaagctcctgttaggcatgcgttgggtcttctcactcttaactgctattccatagtccccatttctgtatttctgggtgactttccgggatttatcttccaattcagtaattttattttttctgacaatgtttaaccattccttgagattttgaaattttcctgacttgattttttattttcaaaactctatatactaggaatgtacttttcaatgtcctttaatttatgtatttgattcttacgtatttccacatgaattcctgcatagtccctcttgcgttatttaattacttgccatccacaggagcctaagaaggtgtggtttgtgatttttcctcatgatcagttgttttctcctgtgcttggtaatttggactatgagaacaacttcaggaggaaaacgtgggaactagaactcgtgtgtggcctgggaaagagcatgttcctccaaaaatagttctatatttgcctctgtcaggggctccaggagtgaatccacataggaagtatatatctgaatcccaaattcacctgcagcacagacctgcaattacacattccctgcagagacacagctgcttcatccagagctcaggtcaagacagacaaagttcttattgcccccatgttaatattgggatcttttttctaattcaacttttagaggctctctaaggttccaaccttatggaacattccacaaccttccagagtgaaagtgtcattcagttccttgccttaggttcctgctataccctggccacctagggcacaggaacagaaggtgtaccccccaccctaccccagtgctcacacactcactactctatttcatgactcctttgtgtcctgggtccttggagaattcccttgttctcttgcaatcataatcatcactagcgacatcatcatcatcatgattgacattgactgagcccttgtgctacatgcgtgctctgctctaaccactttccatgaatgcctcatttcacccgcataacaacacgatgaggcagatgctgtaattattcccattttacagatgagggaattgtgatttcctttaaaaaccagacatttcccattggaaaaaaaaagtcctaaagatttagctaataattttataagaggactaggagaaagccaaggaggagaaggataaggagttcacaaaggaaaaggattttccaaggtgtacatggcgagttcgcatcaaagtcagaaccagcgccctccgtccttgctctcagcccagtgccaggcttccttgttaggagtattcttctcatgaaattctactgatttcttacattgtagcccagatatgatttgctgagggatatctgagagaaagcctatgtgtcctttccataaagcgtaccttgactgcttttttcaaatctctctcttgctactgatctttctaacttaccttgatattgggaagtgtggtctttggagccatgaatggagaattagggaattagggaaacatgagaggtggtggaattaattcattgtatcttgattatggtggcgactatgcaggaatatgtgattgtcaaaattcattgacttgttcacctaatgtgtgttcatcttaatgcttgtaaattataccttaacaacgttaactaaagaagtaattaaactcccacattggacaaggagggatctagagcactgaatctgcacagattctctgagctcagtctaggaagagaagtggggctgaactatacagaagatgttgaaattagaaacgtactttccaggaataaattaaaaattgagtttttgtccacctacaataatcaggcactgtgccaggtcctaggactgtaaagaaaactatctctgatataagcttataatctaacagagaagacaaaaagtagaaagcttaaattcagtgagtaagtgctatgatagaggcaggagtgggttgcaaaggagaagcatcaaatacagatgaatggcacaaaaggctttctgtaggacattcatatagagcctgagaaatcaggagaactcctccaggatcactagctgtattagttcattctcatgctgctaataaagacaaacccaagactgggtaacttataaaggaaagaggtttagttgactcacagttcagcagggctggggaggcctcaggcagcttacaatcatggaggaaggggaagcaaacgcgtcctccttcacatgaaggcaggaaagagaagtgccaagcaaaaggggggaaaagtcccttataaaaccatcagatctcatgagaacagcatgaaggtaaccacccccatgattaaattacctcccaccaggtccctcccactacacctggagattataggaactacaattcaagatagatttgggtggggacacagtcaaaccatatcactagccaaagcagcaggtgtgtgtgtgtgtgtgtgtgtgtgtgtgtgtgtgtgtgtgtgtgtgtgtgtgtattcagtatcttgaactagaccactgctcttgaagatctcttgaccatgtagaagccaggataacacatttagctggaagctaattgtgaagctgggaaattatgcatgtatagtgatgttgggcacaaactcatgttatgttcaggtaacaagcagagcattttgggttcctttctttaggagttgtctaattttacttcatttgttatttctgattatattggttaccagccaaaaaattgtctttcttggccagagattcaatgccttattctaaatgtaaggaaaatccttccttttgttgaaacttcagaaactttctaattacctgcctttattcaatacctcaaaatcaattgtatgcctgtcataatgtttgcatcctaacactctcttctcctcattccacactttgtctctaagagatccccctttctcccatagttttagctacctataagttcacaactgttcattctatatctctcgccaagacctgtcttcttagctccacttgacccagttgcttactgggttgttatgatcttctagcttcatgatgacctacttgtttattgggttacaataatggcaaagacttacactgtgcttactgtgtgccaggcacatattaatccatttaatccttacagcaaccctttcaggaaggtgctagtattgtatagcatcctgttggatgccttccaggcacctcatcctcagtgtgtgcagaactgatgtaacccttattcccctgaaacctgcaactcaaccttctgtacttcacattttattgacaccatcttttaaccaggtgctcaaacatgaaacctagaaattgtccttgatcttttccatacgcaaccaataatttaccaccaaaagttttcccttcaacttttcttaggagaagtagcatcatgtagtggctgcaggttttgtctctggagtcagacagcttagatgtgaatcctggttctgccatttaatagctgtgagtccttacagaagtttcttaaagtttctgaaccctagttttcttgtgataattaaacaagttaaagcatgtaatatgtttaggacagtgctcgggaaaaagtaataaaatatttctttgtctttctcagtttccagttggtggacagtataatatactaaaagaacaaaaagcaacaagggttttgctaaagaacaaaacaattggtgacatacagacctgggattatgtcaactttttaccaccacctatatgcatgacttgggcaagttggtgaatccactgagcctggtttctttatctataaaataaagataatgccacctacccacagggccattgccaggaataaatgagaaactgtatgtaaatcgcctagaaccatgcctggcctatgaggacagtatatgttattccttttctcctccaatcactgctcttgaattccctcatctactactaagaaggaaataattggctgccctagaagcaactgggcatggtagatgggcaaaaagaagggagccactcaatgcatttgtcagttttgccaggagctacaggatccagaggcacgggcaaggattctgcctctgccatccctagctctctagctttataaatcatggcttatgtgtttattcttcaccaatgtccaatactcatatttctggaaaagtatattcctcaaccttaccatcctcattacagcaagtagtgggctccttaatgctgagggccttgttatttcttcatttaatggtgtgtccatggggtcctagggcatgagggcctagacaaatgcaaggctgtctctactccatcagatggaaggccaggaaagccaagggaggggtggaaataggggtggaggggtagatgtgtcatggttggaccccagtgcaaaatgaaaatgtaccaccctggttttaaaagtatcaagtatttcatgatggcaatagcagagcattaaaccaaacatgggcccttctgagcttgaggccctatgcaactgtgtgtgtcacacaaccatggctcctgtccttggtgggaaagacgtggctccctttcccacagtttcctgctgccttctctcagatgctcacaaatagcccaaaccgccctcagacatggctttgtcttctttcctctctactcaacttggacattgggagactaccttacaaagcagagttcctgacccacatcttccatctcactttcaccagggatcggcccacacttggaactcctgatctatcagggtctgcttttccaatgagctttactccttctctctaaaaagaaaaaaaagtacggtagtgatgaagtgccgattcttaaaagtcaacatatagtgagtgctagtttaattccacataaactgcttttagcataaattcctatttcatctttaaaatgatctcatcatcacaacagtagctactgtaataactccatcttacagataacatacagatttggagagacccagcatcttgtccaaggtcacacaacgagcaggtggtggtattgggtttagaactcactctccactctggactcctgagtgagggaagagtgcccagagcatggagaggtgcatcatgggatgaaacagagagcagcagcaccagacaaacaggaagaaatgaaccatctctctaataggaagattaaatactattgagataccatgctttcccaagtgactattgttttaaggcaattttaaacaaaatagtgataattttgtttggttttgttggaatggctttctgagagaataatgttgatttttagctacaggcaagaaaactgtaaaattgaaaaataatacaggataggacgaatagccccgactattttgaaacatttcacaaagctgcaataatataaacggtgagttttaggcataagagttgatagactgatgtgtataacagaatagattgccctgaaacactcttatacaatataggatttttttgtatgaatatgacaatctgagaaatcagttaggggagaagaggatagtcataattgttgtagcaatcactgattaactattagtgaaaaatctacatagatcccaactcttggattatagagaagaaagtaaaaaagcaaagccattaacattagaagtattgagttagataggaggaataagttctggtgttccatttcacaacacagctgagtatacttcataattatgtgttgtatatttcaaaatagccaaaagacagtatgtaaaatactctcttcacaaagagatgataaacattttaggcgattgatatgttaattactttgatttgatcactccagaatatatacatgtgtcataataccaccactttgtatcccataaatatatacagtgattgtttttcaattaaatgtttttaaaaatgtagaagtaaatacaaataaatatacatcaggattttggaaggagaaagtctgtgtacgcccaaagcaatgacataaataatggatgaaagactgatgaatttggctgcattaagatcaaatctctctgaatgtcaaacatcataaaatttaaaaacagttatgtcaaccagatggcagaacaggaaatcccagctcttgtctcctcacagaaacactgcttggaacaatgcacacacaaaaacactttcacaggagccaaagaatccagatgagaggccacagcaccttggtggagcacagaaataagaaaagctgcattgaagagagtaagaaggagtttcacattactgatgtcaccaccacccaaacgtcactcagcctagtgtgaagaaagatagccttgcatgaggggaagagagcgaagtgagtagcatacgttgctgcagacccaacaccaggacagctccagtggaccccaattccaggcctatagccccagtttccaggcctgcctcgatggccccgggccccagacccacttccataccaagccagcccccacagctccagcctctagggttgcatccacagaaccaggctttagacccacttcagcacccgatcagcactagtgactccagactccaggttggctcatgtggttccaggctctaggccagcccttacaacccccctggttccaagctggtctatattgacttaggatccctgaggactcaaagcctaggataactcaatcaccaggctggttcccacagaacctggctctaggttcatctccatagacccagtctccaggcccataccaggggaccccagtgccaggccagctcctgtggattcagaatggagtcccacacctgtggatgcaagcccgaggctcatccatggggaccaaggctctagtcttgccctcacagatccaggcactgggctggctcctgtagacccaagttccaggctcattcatccactgacccagacacagccccctccagcatgaggacttcaatagcaagcctcactatggacctcattagatggccccacccaaaatctctgtagaagctgactggtgaaggactttacataacaaggcaataagtaaaaactggaaaagatgcctaatttttaaaatgcagacaccagtgcaaagccacaaggatcacaaataatcaggagaatatgacatgaccaaaggaacaaaatgaaacactagtaactgaccccatagaaatggagatctacaaacttcctgacaaagcatttaaaataataatcttaaagaagtgcagtgagctacaaagagcataaaaagataactaaaaatcaggaaaataacgcatgaacaaaataataagttcaacaaaaagaaaccattttaaaaaacagaaatccggagatgaagaacatactgactgaactgaaaagttccatagagaacttcaacaacagatttgataaagcagaaaggagaatcagtgagctcaaagacaggtcatttgaaattacccaggcagaagaataaagagaaaaaaagattgagaaacagtgacaaaaccctctaggacttacaggacacaatcaaggaaccaatatacacattataggagtttaagaaggatcagacaaagagaatggggcagcaaggtcatttaaagacataatgacaaaaaacttccaacatctggagagggaaatgaacatccaaatccatgattccaaaacaaccccaaataggttaaacagaaagagattgtcatgaggcacattatagttaaatttgaaaaaatcaaaaacctagaaaatttcagaagcagtaagagaaaagtgacttgtattcaagggaaacttccctgtaggactatcagcagatttctcagcagaaatcttgcaggtaaggagagaggggatgatatattcaaagtgctaaaaggaaaaacactgtcaagcaagaatacttcactcggcaaagctatcctatacaaatgtaaaagactaaagacttacccagacaaatgaaagctgagggcactcaacaccactagatttgcctttcaagaaatgctcaaataagttcttcaagttgaaatgaaaggagactaacaatataaatgaataaaactcattataaaggtaagattcagaatactacaatgctgtaatgatggtgtataaattacctctaattctgctatagaagttaaaagataaaatcattaaaaataaccatagctacaataatttgttaataaatacacaatataaaaaagacataaattgtcacatcaataacatataatgtgggaagaagagaagttaaagtgtagaatttatgtatgcagtttaagttaggttgttttcagattaaaataggtttataactataagatattttatagaagcctcatgataaccacaaagaaaaaacctgtgtgagatacacgaaagagaaagtaattaaagcatactattactacaaaaaaatcaaatcacagaggaagacagaaagagaggaagaaaggagaacaatgcagtcagaaaacaattaacaaaatagccagaacaagtccttatctatcaataattactttaaatgtaaatggattaaaatctcgaatcaaaagccatataatgactgaacaaattataaaagaagatccaactgcatgctacctttaagagactcatattagctttaaggacagatgtaggcagagagtgaaggaatagaagaagataatacatgcagatggtagccaaacaagaataggagtggctatacttatactggaaaaaatagactttaagtcaaaaattgtcagaagagaccaaaaaaggccattataaaatgaaaaagggatcaattcatgaagaggatataacaattttaaatatggatgtacccagtattggagcacctagatacataaacattaacaaaacaaaaaggagaaatagacagcaatgccgtaatagtaagggactcaaatacctcatttacaataatgtatagcttactcagacagaaaaatcaataaggaaacaatggatttgagcagcataatagattaaagggatcctaacctaaaaaacataaagaacattccatccaacagcagcaaaatacatactattttcaagtgcacatataacattctccaggattgatcatatactaggccttcaatcaagtcttaaacaacttaagatttaaattttatcaagttcttttataaccataatggtatgaaactagcaatcaataacaggaggaaaatgggaaaatttacaaatatgtagaaattaaacaacccatttctgaacaattaatgtgtcaaggaagaaataaaagggaaaattttttaaaatcttaaaacaaacaaacatgaaaacataacataccaaaacacatagcatgcagcaagagtaatcttttttatattactttatttttaactgacataataattatatacatttatgaggtacaatgtgatgttgtgatatatgtacacattgtgagatgattgaatcaagctaattaacatattttaacctcactacttatcatttctttgtgatgataacttttaaattttactttttaataacttcaaaatatacattattattaactatagtcaccatgctatgtaatagatcactaaaacataattcttctgtgtaaatgaaatattcttcctgttgaactaaaactttgaatactttggccagcatctccccttaccccatcaccccacccctgagtccctcaaaactactattctactctttacaagttcaactttttaagattccacatgcagtaagatcatgcagtatttgtctttctttgcctggcttatttaacttagcataatgtccttcaggttcattcatattgttacgaatgaagaatttcccctttttaaaggctgaatagtatttcattgtgtgcatatgtcacattttctttattcattcatccattgatggacacttagttgcttctgtatcttgattactatgaataattctgcaaagaacatgagattgcaggtatctcttcaatataccaatgtcaattcctgtggatatattcccagaagtggaattggtggatcatattgtaattttatttttagttttgaaagggacctcaatattgttttttataatggttatactaattaacattcccactgacagtgttcaagtgttctcttttctacacattctttccagcactgtttatcttttattttttaataagtcattctaacaggtctgagcatttgcttttgacaaaattcaatatctcttcattagaaaaacctctcaataaattaggtacagaaagaatgtacttcaacataataaaggtgacaagtccatagctaacatcatactcaatggtgaaaagctgaaaacttttcctctaaggtcgtgaataagacaggatgcccactgccaccacttctactcaatgtaggactgaaagttttagacagagcaattaggcaagaaaaataaataaaaagcatccaaattgaaaaagaagtaaaattgcctctctttgtattgaagggatcttacacagaggaaactctaaagactgactctaccaaaaaagctggtaagactaatatttgaattcactgaagttacaggccacaaaatcaacatacaaaaattagtgagaactaacagtaagctatctgaaaaataaatgaattaagaaaacaatcaatgtgggtaaatattttaagcaatataacaaaccgttaatacccttatatataaagaacttcctaataagaaaaaacatgaattcttcaatagtaaaataaactgaaaatatgaagagctagttaaaatacatgaatgttcaagaaacataacaaacttctaatcactttttatcaaataatttaaattaatataaaatttagatgggcctctgtttgtctcatgaattggtcaaggttagaaaaatattgacttcattttggcagtaagtattcctaaacattaacattagagatgtaagacaaaaagcaatttggctgcatgaaacaaatatatgaaaatacacctgtgttcccattaataggattatttcctagggtgattaaaaaataactgagaaaaatatttttgtaaaagactttattgtagtgttttaggaaatagaaaaatagtggaagcaacctaaatacccaagggaatgattacacacagtcaatataatacaaatcatgaaataacagaaatttatacatttcatttattcatgaaaaatatattgagggccttctatatgtttttatgggcataaatcctgaaataccaatgaaccaaacaacaaaagcctttgctcttcagaaacttacatttttgctgggagaaaatgggtaagaagcataacgtaaacccccaattttagcaaatgttgaaagatgataaatgctaagaagaaaactatgtctgggtaggtgatggggcagatcagggaatgaggaggtggggttgcaattttaaagtgaattgtaacggtcctcacttggaaggtgtcctttgaacaaatgcgtgaaagccacaatggagcaagttctgtggggagagaagaaaacattctatacagggaaaaaaaggtgcaaagttctctttgcagatatgagcattgctggtgtgttcaagaacaggaaggaggtcaatgtggctggtacagagtgagcggcagggaaggacaggataataagagtaaggtggggaggaggggaagagaggtaactacctaagtgtggggttgtgggggccattctagaaacttctgcttttactctaggtaaaaggaaatctattggcagcttctgagcagaagaatgacacgaaataactcatgttttaaacagatccctgtggttgcactggtgtttttaggctccagggggcaagagtggaagcaggcagacttgttgggaggctattttgcaataatgcaagaaataaatgacagtggaagcagtagaggtgacaagacaggattagtttgaatgcaaaggcaacaagatttcctgatggattggttgtcagatgtaaaaataaggtaggagtcaagattaacctaaaagtttttggccttggcacttgaaaggatggagttggataacagagatgaggataaccttggttagggaagaccagcagtcatttctggacatgttaacttcaagatgtctgctagccttgttgactagacagttgcagcttagggcaggtgtcttgcacaggattgacccacttgagagttatcagtatataaacagtgtttaaagccataaaccttgaataagatcctaaaatggagcgaatatagatacaaaagagagttcgcccaaggtgtgagccttaggcactccagcactgacaggaaggagggaagaagaggaatctgcaaagaggtcaagaggaaagagtcctcgtgatggaaggaaaaaataagacaaaacaggagagtgtgctatcctggaagctgaaggaagagagtgtactgtaaagaggaaatgcttagcagtgcagaatgctgctactaagtccgtgtgttgactgagaacacacactggattagcaatgcagaggtcattttgaccttgacaagaacaatgtgagtgcactggtggggtcaaagagggggtggagcagaaagccatgagagacagaaaggctgaacaaacccattcactggtgccagataccagattctttcaccaactcaggacaactctcaactctttctatggcctctatcttctgctttccctagatcactcttgtcagcgtacaaatattctacaatttctcttatctatttttcaaaactacttaatgacatggaaaaatacccatgatatcttgttgtatgcagtgcataacaccaagaatatttaaggtgatgcctccgtccccaccaacaaaagcctcaccaagcgggtccatgttccccatggctgaagagagtaggggcagggaggaaagagttgctctcccagagtcttctctggctctagtgtttctccagctctgtactgaaatcttattattggtttcgattcaggtagttattttatttctgtcatgatatctactcaaacatgagagtcagtcccttgcctttaattcactaatggagtggttttcaaagtgtaatacccaaaccagcaccattaacagcaactgagaagttgtaaaaaaaatgcagactctctggttccacccaagactcagtgaatcagaaactcttgggttgggacacagagtctgcggtttgcaagcctttggagtcattctgattcactactccaaaccctccacaaatccaaagctgtgctaggtaggaaatgttttcatagaggcatttgtgggttacctagaaggatcacacctcatgccaccctgcaaacaaataaaacataatggatggacattcctccttgtagaaatgccttttccctgcccctgtccccaccaaggagtatttctggctactgcactggtttgcttctctccaaggcctcctttttacccccttcttctctctccttattctctcaaaaaaccctagaagaaaacctaggcattaccattcaggacataggcatgggcaaggacttcatgtctaaaacaccaaaagcaatggcaataaaagacaaaattgacaaatgggatctaattaaactaaagcgcttctgcaccgcaaaagaaactaccatcagagtgaacaggcaacctacaaaatcggagaaaatttttgcaacctactcatctgacaaagggctaatatccagaatctacaatgaacccaaacaaatttacaagaaaaaaacaaacaaccccatcaaaaagtgggcgaagtacatgaacagacacttctcaaaagaagacatttatgcagccaaaaaacacatgaaaaaatgctcaccatcactggctatcagagaaatgcaaatcaaaaccacaatgagatacaatctcacaccagttagaatggcaatcattaaaaagtcaggaaacaacaggtgctggagaggatgtggagaaataggaacacttttacactgttggtgggatcgtaaactaattcaaccattgtggaagtcagtgtggcgattcctcagggatctagaactagaaataccatttgacccagccatcccattactgggtatatacccaaaggactataaatcatgctgctataaagacacatgcacacatatgtttattgcggcactattcacaatagcaaagacttggaaccaacccaaatgtccaacaatgatagactggattaagaaaatgtggcacatatccaccatggaatactatgcagccataaaaaatgacgagttcatgtcctttgtagggacatggatgaaattggaaatcatcattctcagtaaactatcgcaaggacaaaaaaaccaaacaccgcatgttctcactcataggtgggaattgaacaatgagaacacatggacacaggaaggggaacatcacactctggggactgtggtggggtggggggaggggggagggatagcattaggaggtatacctaatgctaaatgacgagttaacgggtgcagcacaccagcatggcacatgtatacatatgtaactaacctgcacattgtgcacatgtaccctaaaacttaaagtataataataataaaataaaaaataaaaaaataaaaattaaaaaattaaaaaaaaaaacaaaaaaaaaccccaaaacaaacaaaaagaagaaggaatgtttccaattgtctttggaagagcaatttagttgcacataacctttgttgtcttttctctttacaatgcttgtaccctcaagaacagcctccaaatacggaaaaacagttgttaagaggaggagtgctgctgttagctgtaagaactaccttctcggaaacttctgtgtatatatttatagatctaaatatctgtatgtgtatacatacactagagataaatagtaatcatcatatgtatacacatatgtattaataaaatgaaatgtgagcagttacccataactagtgggataatagatggcttaggttttcttccccttctcttcctacttctttgcattttcaaaatttcctgcagtagatacattttactcatagagacaagtgatttttttttttttaagacaggatctcactctgtcactcaggctggagtgccttggcacgatctcagctcaagtgatcctcccacctcagcctcccaagtagctgggactacagatgcatgccaccacaccagcctaatttttgtattttttgtagagacggggtttttccatgttgcccagtacgtctcaaactcctgagttcaaacaatccacccacctcaggctcccaaattcctgggagccatggtgcccggccaagacaagtgaaaaccaaggaagaaagaaaggaagaaagcaggaagggaagaaaagaatgaaaaagaaggaaggaagaagtagagaaaagaaaagagcagcaagctagtagcagagagggagccccggttggtcaggggtggaggttgcaggcctgctcatggtggtgtgtatgtctccagtattgtgtctcaccctctgctgctgccaggtgtctccatagaacaacataaggctaggaatttagtctctcattgtaggaaaaacaaggatgtcatgctatacaccgggtgtgtaatgataaagaaatgcaaatgtttagagcaacaaaacggaaacatggttaagtacatgttctaaatataaacgacacaatgccgtaatacaagtaaaagaaagggaaggaaaacataacaatctggtgaggtacaaaagggtcttgttgtcccttagctgtgataaagttctctctccaaccatttcctttttgtcttcttcctagctacatggtccagcctagtctgtctcaatttatcctcagctattaaatgatgttaagtgtctcattaacacttcttgccaccaggagcaattgtgtcctaagcgattttcttaacttctctgggcccaattcattcttttctatttctttggagaactagtatctgaaaaacctttcctctcttcctttcagtatgttttcctttcctgtttatctccacaaagtatatgtttatactacaagtaggcaatcatatcatttttcctctgtatttctaagtcttactcaggccagcttctcttatttcagagtcaagttcagtatgctgtgttgttagcgtggcaaatctggacaggtctgcagcaacctcaatttttgcctcctcagaagaaagacttagactgaggggcataaggcaggagagaccgatgcaagttttacagcaggagtgaaagtttattaaaaagttttagagcaggaatgaaaggaagtaaagtacatttggaagagggccaagcgggtgacttgagagattttagtgcacagcttgacctttgacttggactttgttacgttggcattccgcacgggcagtggcctgccagctcctgggaggggctgcgtgtgcagtctttactgaagttttgcacatgctcacttgaggctttcttcccttactggtcgagtatttctagaggaagatcatgtaccagttaaactctgccattttgcctcatagggcacatgcttaagcccactcacccaactcctgatatcgtacctggaagctgctgatcaccagcttcagatttttatttatttatttatttattttaagacagagtctcactctgtcactcaggctagagtacagtggcgtgatcttggctcactgcaacctccacctccagggttcaagcgattctctgactttagcctcccaagtagctgggacttcaggcatgcactaccatgcctggctaatttttttgtatttttagtagagaaggagtttcaccatgttggccaggctcgtcttgaactcctgacttcaggtgatacacccaccttggcctcccaaattgttgggattacagatgtgagccaccacaaccagccaagattttttctatctattgggagactcccattccctggcgctggctgaaaccaatgatcattttagagaaacagtgtaacaactacttggccatctcctgatggtcacctgacattcctgccgtagggagtccttttctaccttgctcatgtctgactaactacttactgtaacagtgtcataggctaaacacatgccactatttggagtagcacagtgtaagtcatgtgtcccatctcttcatgtacagttgtcctctattccactctcgccagcctttaccgagtgtcatccatgcggcatttgacaccaccttcctcccattctacagaggcatgcccagtgtccacagcctttgcagtttcccgtggctaagaaacaaggcattatatggtttgagtggtgctattttacctggcaaatgctcactgacatttattgaaattgatgccttagttttacaagccaaagtggtcatacagtcacacttgcttaattaatgcttcctaataaagaagcaaaatctgtttgtgcctgaaattgtgcttggtgctccaggaatagtcaccataacaaacactaggaccttgtgatacaaaaccagaaaagggtgagtattagatgtggttattagatgggggccaggccacctcagatatggtggcttaaacaagatggaattctgttcccttctcacctgacagttcagattatacaagagaaagaggcagtgcataaatagaaggagctacagaattactattcctatttatagcaagattgaaccagataaatcataagtttcttgtgtaatgagtccagcaatacttcccaaaggcaagtcaatttgcagaggttggtgaaacctggatcagaggtgagaacgggacaaataagaggaagaattttgtttagcattttagactatttcatctgccaatcactgtttgccatttttatgtatatgtttaacagctttattgaggtataactgatatataataaagaacaaatatttaaagtgtgcaatttgataagttttgacatttcgtgcacatttgtgcaatcatcacaatgatcatagtgaacgtatccatcaatccaaaagtttcctcatttctttttgtaatctgttcctcctgtcagcctcctttcctcctccttctatcccctcccccagcttcaggaaatcactgatctcccttctgtcaccatagattcatttgcattttctagaatttcatatatttggaatcacacaatatgtactcacttttgtctggcttccttcactcagtataattatttagagattgatccatgttgttgcatgtattagtagttcatttttattgctgaaaagtattccacagtatgcatatatcatgtgtttatgcattcaatgattggtgtacatttaggttgtttccagtttttcattagttaaaataaagctcctatgagcattcataaaccagtctttgcatggtgtcttagtcctttcaagctgctgtaacaaaacattattaacagagcagcttgtaaacaacagaagttgttctcacagttccaaagttcaagaagtccaagatcaagacaccagccaattcacttacggtgaggacccactttctggtttatggatggcactttctagctatgtctttacatggtggaaggggacgaacaagttcgcctgggccttttttataagagcactaatcccattcatgagagctctgccctcatgacctacctaattacctcccaaaagaccctaccttctaataccatcaccttgagagttagaattcctttcaacatgaattttggagggacacaaatattcagaccatagcctaaggtcatatggttttacttcttttgagttactacctaggagtggaatagctgaatcatatcgtaggtgtatatttagcttttaagaaattccctgttttccaaaatggttgtaccatttttcattcccaccagcagtatatgacagtttaatttcttccgtatcatttccaactttggaattttcatcacagcaattctaattctgatagtgttatctcactgtggttttaatttgcatttccctgatgactgataatattcagcacctctttgtctgcttactttccaaccatgtgtcttttttggtgaagtgcctgttcaaatattttcattgcttttcttttctccattgacttgctgtatcatctttatcaaaaatcagttatctttgtcagtatggatgcatttctgaactctgttttatttcactggcctatttttcagtatttatgctaatacgatactgttgattactaaagctttttgttgttgttgttgttgtttgaaatggagtctcattatgtcacctagtctgcagtgcagtggcacaatcatagctctctgcagcctttacctcttgggcttaagcaatcctcctgcctcagcctcctaagtagttgggactacaggcacataccactacacccagctaatttaaaattgttttctagagatgaggttttcttatgtttcccaggagtttcttgaactcctgggttcaagcaatcctcctgtctcaccctcccaaagtgctgggactacaagcgtgagccacctcaatcagcctttaaaccaagtcttcaaatcagatagtggtaggcctccaacattttctttttcaaaattgttttgactattctgtatcttttgcacttccatatagatttttaaattagcttgccaatttctactaaaaaatttcctggttttggattgaaattgtattgaatttatacattaatatggagaaaatgacattttaacaatattgagtctcatgactgattagtttagtatatgtctctatttatataggtctttaatttctttcactgcaattttgtagccttcaacgtacagatcttggatatcccttgtcaaatttacctctaagtatttaaatttttaatgacccttttgaatgacattttaaacatttcaatttcacgttgctcattactagtgtatagaaatacaactgatttttgcatagaatttcttgtcttgtaacaatgctactcttgtttgttctagtagtttttattgatttcatcagatattctatatggcaatcaagtaatctgcaaatgacagttttacttcttcctttccagcatgaatgccttttatttcttcttcttgcgttattgtattagctagattctccagtacaatgttgaatagaactcatgtgaatggagattcttgtcttgttcctgatttcacagggaaagctttcagtcttttatctttagatatgctgatagctgtaggttttctatacatgctctttatcagtttgagaaagttctcttaatttgctgagaggtttataaaaattaggaacagatgttacagtttgtcaaatgctttcgtctttattaagataatcatatgtttttcttattttagtttgttaatatgatgaagtacattggttgattatttttaatgttaaactagccttgtattcctgggatagattacatggccctgatgtatactttttatagatttttgaattcaatttactaacagtatgttttttagaatttttgcatatctatttatggaaaataatggtctgtagttttagtttttcataatgtctttttccagttttgtttttaaggtaatgctgaccttatagaatgaattgggaattattccttcctcttcaattttcttgaaagagtttatatatagctgatatgatttcttccttcactgtttggtagcatttaccagtgaagccagctgagcttacaagtgcctttgtggaaggacttttttctacaaattcaatgtgttttggctcttgctcttaatatctatttggtgagatcagaacaatgtttactgtctggccccatcactgacacaagatactcatgcgtacccaattcaatgcctcatgaattattgggttaatcaagttttccattctgtctggtaggaacaggcaagcatccctggccccgtgtgagtgctgggcactgttccttccaatcttctgggaaggttctttgcccggcctttgggaagttttattgcacacatgccctgatcagtcctctgctggatgctcaagggaaccctctgcagatctcaggagttctctgtgcagatttctcctcccctggtattctattctgagcactctaatgttcttgatcttccagggctttcagttgctcaactctgggagtcctctagcctccacctgattacctctccctgcaccactcctggaaatgctctccaggaagtcagctgggatgaatgctgtgctcctctcgttttccatctctcaggagtaattatatttcattgcctggtatcagtgtcttgaaaaccactgcttctagtgtttttgttttcagattgggtatccctttgtccactgcttatagcagcctcagcctcccaggttcaggtcatcttcccagctcagcctcctgagtagctggaactacaggcacgtgccaccacacccggctaatttttgtatttttagtagagatgaggttttgccatgtcactcaggctggtttcaagctcctggactccagctatctgcccgtcccaccctcctgaagtgctgggattacagacgtaagcccgcgcccagtgcttccagtgttttgtctctcttgttgttcctaatcttgttgttgtttccagtgggaaggtaatcaggtcccttttactccctcttggtcagaaacagaagtccaccctttgttcttgaatatataagaaattgtgcataaatcctccttgagagacaactgtttctcttggtcacctccataatgtcagagagaacattcaaagagaggggtgaagatagcgcttctaaaaaatgcatagctgtgagagctggaataaaatgtgcaagggtcatgaggaggtgcttgtaacaaaagcaggagaccccatagccttgcaggcttactgtggtagagggagcaatgcctcaggaaggccaagtcagagaaatattgactttctggatggtcctctgggtgttgtaggaacttgacaacaagctgtttcatgcctgtgattccaagctaaatgtgctacatatttgctaagtgtggaggcatttatgaaggccaaggggaccccacttattttaagcgtcctgttgtgctccatcagtggtaatgggggttgagcagccaaatcatcatgcattacctccgctgggaaattcactctccaggatctaagtggaaaagtaacaacagtttcaactttaggcgaaactcacaagggtgcaagttggagataattggaaattactttggtctgactgtgcccagatggtggacttcctttgttgcaaggtgtcattctcacactgatgtttatgctcactacgtgtgtatttttgctgtaagctgccttaagatcctttgtgggagggaatataggcccaccaccctacaggttccggggttgcttcctcagagcaaagaaaccatgatccaaaaaaggagatggtcaaaacaggctacagatactactgttttgcttgatacctcttttacaaagcaattgaaaagttaataattgtacacatacattgtgccaggtagtgtgctaggtgcttgacataaggtactgcatttaactctcataacaagcatatatgataaaatggtctcaaatttatgagaagcaaatgaagactcagaaaagccatatgccttgatagatacagtgtgtttacgttcgaatcccaggatttgtgattatgctgcctagagaatctttacctttggacagggctataattagtgtattctgtgaggttgccctggaaaacagaaagctcttgggctttggaatgcaacacacatagtttagaagactggttcaacctggaaaagtcatccatttttccattcaacagatacatattgtaggtgatgaaagaggcaggagaatagatcagatgagattcttactccaataaaactgcagcctagtaatggtggcaatgttgagattcaaaaccaactttgcccagcacctagacttgaactctttctatgacatcattctgccttcctgataaaatttagcattatactgacttccattaggctaatggactattttggctccagaggcagcgtgttatagtggttacaacttccaactgtgaaacaggctgcataagttctcattccgtctctaccacttactatctgtaagatcttgggtaaattacctagcctctctctgcctcaagtgtttcattgatcaaataaaggtaatgataaggacttaccaggtaggggttttctgagggctaaatgactagagaacttagatgaatgtttgatccatcataaatactaaattattattattatcatccttgccttccttgcttatacctagaaataccttcttatctagagttaatggggattgttttactttcctatgaaaaactattgcacattaaatcaatgattttagaactagaaagagcaatagaaaaacatatttttaaatacttaatattatctctacaaaaaaaaaaaatctcctgacaaattaggataagtgaccccgggaaaccagagtaactcagctaattagtagcagtgttattactggaacccaggagactgcaagatttctctttcctttatgttacaatgctacccttattccgctcagattttatcttagcacaattgctttggtgtcaagaagatatgggataaattcctggttcctctagcttctggctggaaggcctgtgcaagttaccaaaccattcagagtctcagttttttcatctgtagcatggggataagagtgcctccttcattaggtttttgtgatcataaaatgagataatgcttatactagattaagcacagtggctgacatcctaagagctttgtaaatattaaatatgcatggtgactgacagcactggctttggagtcaaatatgagtagatttgagctccacgtccatctaccagacttgtgtgaatttggtcaagttacttaacttccctaatcctcaccttcatctcatgatctgtacattaaggattgtattgccaatatcttagggtttctgtgaggattagatgaaataatgcgggccaggagcagtggctcacacctgtaatcccagcactttcggaggtcaaggtgggaggatcgtctgaggtcgggagtttgagaccagcctgaccaacatggagaaaccccatctctactaaaaatgcaaaaaaattagctaggcgtggtcgtgggcgcctgtaatttcagctacttgagagactgaggcaggagaattacttgaacccaggaggtggagattgcagtgagccgagatcgtgccattgcactccagccaggacaagagtgaaactctgtctcaaaaaaaaaaaaaaaaaaaaaaaaaagagagaaagaaagaaaataatgcttgtaaagcaacaaacacaatgcttggcataaagaaaataatgcttgtaaagcaacaaacacaatgcttggcatacagtcagtatccaacaaataataacacatgcaaatatcattataattactgtcattattattcttttattcatctggtctctatcaaaaccactgtgtgattaaataatgttctcaaaggttccggacctgtaaaccatctcactacacttagataggggactattctgcatctctagtcagccattttcccccagaccataatcagtaagagtgaactatttggcttgcaaaatggcagccttcctgttgcctgacggccaaaaggcaacttttggtgagactgctttcatatgaactcgtaaccatagaaccagtttgtcagggaattcttcaagcacataaatgattgaacacttactttaattcagaaacatgcagaactcaagatctttgctaatctctacggagggtgaaggaggaagatgaagtttaatccactgatgagagtaagtacgctgttagggcttcattttctgctttctgatagatcctgttgatggagaggaccacagtgacaatcacagtggaacacttggctcatccggagtagctttaacacacttggtgtgagctgcagggccactagagaagtgacagccacagacactgtctcccatgatgattagctggcctggaacaccagctcttccttatctattgttggtatggcacaagtacaaaatatataatatgtatctttgatctctaactttcccaatgagaacagagtgacccagaaacattgtgtgaaatatctaaagtctcatacttggttcatggagaggagggaccagattccaacttctgggctgcaattgatattattactttcttatgatttccacagttactgcttttgttattatttcttgctttttcagatgagttagtactctgcacagacgggttaaatggtgtgccatccagggccacatagccagttgatggctgatctgagacagatccagttcttctgatcctcattttgccgttctttccactacacaatggcaatacaaaaatcctccttctggagtctagccgttgaaagttatgaagcattatctctgccgttcacatcatccagtggtgttttaagcttgtttgccatggcaaccatcaacatattaagcccttcaaagcagggttggaaaggcaactgcagcccgctattgttcctgatgatggatgggagagtgtagagccaaggatcagttactacagatcctcttccgctcaagcgatgtagattacgcagcagctggaccagaattcagtcttctccatggaggtttcctatatggtatgtgcagcatggagggtttatgttaaacacgtagcaaataaaaacagaaataaagatggtaaaaggtcactcctttgtccttccctccctcccttccttatttccttccttcctttttctttccttccatccatctttctttccttcatttatttctatgcaaaggatagcagagtcctaaattccatgttaagaatatgtcagtgaagcagataaacttgggccatcatctcccaagcatctaagaaaacagacactaaacttgatgggaaatataactagatagtttgcttcttgtgtctttcctttttcatcttgtttgccctcccctaatatattcaacaaagaagtgtgcatgtgcgtgtgcatttctgtgtgtatctgtttgtgtgtgtgtgcatgtgtgtgtgtgtgcatgagaaagagagacagacaagaggagagagaaaaagaaagggaaagagagatttgtaaagatattgcgtctatctgctaagaaggcctagaggccaatgtaatttctttgaaccgaataaagaattcatggtcatgtgaagtttcaaaataatttcccagtttaccgttccttttcaggcagtgcatctttttaaaaagaggttattcagaacaagtcagaggagggagggacaacacttttcaaaaaccagggctgtaattagtgctaagcagacacacgtgctagaagggagtgctcaggtacctgggccacggctttgttctcctgtccagatgctgagccagctgcagggtggccagggcgcctgcacccctcaccttctctgcttgtctgatacgtagctggaggcttctctctttgtctgcccatctggctcctggcaccaggaagtaaaattattattattttttccaaatgaaaggctttgaatcacagctgttaattaccagatgattattaaaaacacatattgcctactgaggtttgagaagacaactcaagcgtgctgtctggccctactctcaggggctctcagcctcaagtcatgtacacatttctttaaagaacacaatgtggttttattatacccgcagacaaatgcaaataagaacggaagtgaggagagcccagaaccctgttgaaagttaataaagacttttcccgctgcacctcacaccccagaatctcaagtagtttatcgtagcccactacaggtcttggattacctccatttcaaaacccgcagcccctccgatggtgctaaggcctgtgccccagtgatgcctgagaaaagaaaggaacgacaaggcccggcagaagggcactcataaattatagacctcagctgtcatgctggggtgctggatctcgggtgaaggacagatggaggctgcctgagcaggcacagcctggggtggggagagcagccagtgagaggtggattctttgcatgtcaggggaaatgactggaaattatggctgggcaaggaaaaggcagcaggcttggagcttggactgtgtgttggagtcaggggagtgaggggctccggatgttcaggagccatggggtaggtttactgtctgggaactcaggtccagggacaacaagttcaggcctatgatcaaggagtatcttgttcttcctgaattctcatcgtgatgcaaggcactgtggggaaaaaagacgtcaaagatgggggatgcctgttcatggggtttacaatctgttggcaatgaaggccatgatggatgcagtacttcaccaacaagggaggacagaaaccttagtgctaaacttacacattcaacaaatatttattggatactcatcacggcatgtgtgaagtactatattaatgaacaaaatagaaaaatataaaataaaatctttgctctttttgggcttatattctagcacagtgagacaggcaatatacaatttgaggaagtaaaataggcctgatatagacaaataaattctatggagagaagtcagagaacaggaagggtagccttggtgagggtgagcctgattagaagtaatatgatcagagcaggctccagagaagaaatgacttgaaggaggcgagggaatgagccatgtcgacatctcagatagaggaagcatcccaggcagaggaggcagccccaaaaaggtgttgagttagaaggaaaacttgcaggttccagaaacatcaaggacgtcacagtagctggaggggagtaagaggaagggacagtgagggccactgggtcagagaggaaaacggggaagcaatgcacctatagggccttgaaggctgttacaaatatttagctcttcgttaggagtgagatgggaacacactggatggtgttgagctgaagaaggacagaatctgactctcattctaacaagatgcctctggtttgcgtgatggctctcaaacttcagcgtgaatcagaaccacctggagagcttgtggagcgacagaccactgagtgttgaggcctctcgctagattcagtgggtctagggtaaggcctgggaatgtgcgttactaaccagtctctggggatgattctgctaccagtcttgaggaccacactttaagatttgctctaagagaaacaataggaagcaaagagggataaagcatcctggactccctcccagaggaggtagattggtttgaggccccaaagaaaaggtaggattttgaacaggaaaaaattacatgagaaaagcagactggttgtgtttcttctctcccactctacctgctgctggaaagaatataaagaggtctatacaacatctatttacacagttatctgcctagagctctctctagcgaccctatcttttttgtggcaagttctagcctccctatgcaccttttcaaggtttacctcttcctattaagcttaaaaaaatggtggttgcacaagtcagtgtctgtccttggttctccctgtggtccacttgcttcctctgtctcctggcccctctcacacttggattgctgccatcctctaatggcatctagagacaccagccctttactctactggcaaaataagccctaacccatggctactggaagtgacaggcttttactgaaggcttgttggttctggagagtgatcgcacagcacagaacagaaaatggcttaaaattggctaccaaccatcacagccctaaaatctcctcagccatccatgactctaggaatttccttgttggctcctcttcccaagcctcagtttcctgccttgtaaataggctcattacgtttccaagaacccagtcaccccattgctcttttttgtttgttttgtttttgagacagagtcttgcttggtcatcaaggctggagtgcagtggtgcaatcacagctcattgcagcctaaacctaatgggctcaagtgatccttctgcctcagcctcattagtagctgggaatacaggtgtgcaccaccatgcatggctatttttttccacagagacggggctggtcgtcaacttctgggctcaagcacttctccctccttggcctcccaaagcactgggattacaggcgcaagccacagcacccagcccatgccattgctcttgaagctgattcccctgtcaaccagtcaggctgcagcccctaacccctcttacacagccaagtggagcagctcctctctgttgcctcctaacacttcttcctccagtccatgcctttatgggatttgcattttccaaccccaaacagctaacaacctttgtgtaaggaaaagcagagttctgttaggaagacaaattgtgtggtcctcttggagcatctggcttcaaaagcaacaagtttatatagaaatgctttcttcatccttctaattacacatatgatgtagcataatcaaaagtattttaaatatatcttaaaagtgggggacaaaaggaaatgaaaggagaaaaataaggtgaagccaatacacaaagcaaataccttttcatcccaacagctgctgggacagctacaaatttggctttccctgggttttcaattaaaagggagcctgcttgtgaacttgtgagagccgcttcctgcagcaggaggagtaatgctgattaggtgagttagaggggccagcctaccaatatgccaggaaaggagtttagactaagtaagaaaaaacccatttaaggtttttgttcaaaggcagacagtctatgacaacatctaaggacaatcactctggcaacagtcttcaagacagactgtggaatggagaatatggaaccaggaaagtcagtcccaggctgacactgatgagagaatccagaagaggtctgcattgctctcctttacccattttttaggctaatctgctgtcatacagctcattatgcaaagcccagtttccatgcaaccacctccattgtctttctgactacccaaaatgcaagaaatccctctgtcttctgcatgttttagaacatgatatatagcatgcgttaaatccttattgtataatttttgtaggtgtttattagaaaataagctgcatgagagcagggccagcttgtataccatgttgcctaatgtagagtcgaggtcagagtaataacaacaataatgatagcagcaaacacttactaagaacttacctgctcagccaggatccctctttaggtgttcattagtatagtggaatgtaaagacgtgagtggaaaaaaccaacaagcaagcaaccaattgcacagcagacaccagctgggtggcatccaatccaatttcattctgaccaccatctacctggagatagagtcagatcctacctgttgagggctctcagtcccacaagactgtttccccacttctaatgcccgtggcaagcctatgcatctgaccaacctgctacaaatcaggaattccatgaccttgtccttgggtttgattgttttgctactatggctcacagaactcaatgaaacatttacttgcatttaccagtttattataaagggtattgcaaaggatacaggtgaagcaatgcataggatgaggtacaggggaagaggcatggagataccattccctccctgggtgatccaccctccaggaacatatccagaagctctttgaacctatctttttggatttttgtggaggcttcattacataggcatggctgattaaaacccatttatgccagtgttccattattggaacactaagcatgtgggggttatttatgtcctgctgctcaaggtcatcgccaaggcctgatttttcaaattcgaaaaattgcaacctcaggcataaatgggttaagccattggccaattcgtgatcaacttaaccttgagcccctctgtccttcccagagaaagaggggtagggctgaacgtcccaactctttcatcctgccttggtcttacaggtgacaagtccctatactgaagctacttagggacttccaaccaccagtcaactcattagtgtacaaaaagacaccattttggagattctaaagactttaggagttgtatgtcaggaaacagggttgaagaccaaatatctattttacaatatcacaaatgatatatggtataagataatgcatcatagggttgagatacagtgtgtaatgataagaaagaactattgatttaggagtcaggctatatggatttgaaatctaaaatgtccaggcatgtactaaaaatgtgaccttgggcaacttatataacttctctgtcctgagttttttttatctgctcaaagggattgccaatgaagattaaatgagttaatacacgtaaaagatgccaaagagcttctggaatgacctgagtgttcgataagggttagccttagccctcagggccattagacacaacgggtatttgagaaatattggtacagtgcactctgagttcacacctgtgtacctgggttattgtggactgctaatgaagatgggatgtcgaaaacaagagttgttctgtgaaaacaagttaattttcacagtatataagtttgtttgtaattgagatataattcatgctgcaaaaaacacccttttaaagtgcataatatgatgttttttagtagttgcaaagtcaagcaaccactaccactatctaattccagaacgatttttatcacccccaaaagaaaccctgtacccattagcaatcacttcccattccccgtcctcccagcccctggaaactgccaatctactttctgtctctatggatttgtctattctgtatatttcacaaatatgaaattaatcaatatgtggccttttgtttctggcttcttcatttagcattttgttcatgttgtagcataaaaagcactttttttccttttatggctgaataatatttccttgtgtggatatgccatattttctttatccatttatcatctatcaattgaaattgttatcagttgatagaaatttggaatagttctactttttagctatcattaagaaagcatctatgaacatttacatacagagtttttttttggataatgttttaatttctctcgggcatatatgtaggagtaaaattgctaggtcagatggtaattctatatttaacatttcaaagaactgccaatctgtttttcaaagtggcttcaccattttgccttcccaccagcaatgtaggagggtctccacatccttgccagcacttgttagtgtctgtcatcttgatgatcaccatcctagtgggtgtaaagtggtatctcactgtgagtttgacttccatttccctaatgactaatgatgttgtgcatcttttcatatgcttaccagccatttgcatatctttagcaattaattttaatatgatgtatttgagattgagatagcagacttaagtaaaattgactaagaagtaatatatgccacataaagacatggacacatatgtggagcagataaggctggggttagagattttgtagtagtgaacatgcagatgggcactgaagtcataaaggggagaaatgtctagtaggaagacaaggccaggttcggtggctcacatctatagctccagcacttcgggagaaaaagacaggaggataggttgaacccgggagtttgggaccagcctgagtaatatagtgagtgaggcctggtctttagaaaaaaaatttaaatcagctgggcacagcgatgcttgcctgtagtcccagctactcaagaggctgaggctgggggattgttcgagcctaggagcttaaggctgtaatgagctgtgatcacaccactgcactccaacctgggtgccacagtagaccctatctgttaaaagaagaagaagagaagaagacgaagaaaagagcagggaatctacaaaagtcaggaatggatctggggtgcctctttgagagcaaaattcggatttcaaggagttctgttagaatcaacaacctgcccagggtcagtagtttctctctgatataaaacagtccatagaaaggtcattgccagctccaggagccagacagtaagatctcaccaagtttcactataaaaaaagaattctagttagagggctgttgcccaatgcttcagtgcatagaactacgaggctgcttttttttcttactctgatgaaatacttttaagtttaagaatatcgaattgttttctcttatgattttttatgctataaaaaccctacaatttgatggaactgatctgactgttggttctaacattttgtgtggcgcacctcctcctcctcctcccgtgtggggtcttcccttatctctccacatccaatctcttgactctaattttgctctacttagaggactcaaaaggaaaatcacaagcattgtgtaccttctcttcattatgttcacctgttttctttagatctaacatatgtaggtcagctcccattttcatattgcttaaaataactcgtttagtctccttgggcaggtcaacacttagtcttgatgctgatcttccacttgtgagtgagatcaaagcatttccttgtatatgatgttatttaatcagctccaaattcctctagaaaaggccttaaatgctcctgtttattcctcttatttcagttcattttatgcagcttcaaacacaactgacactcatccaggtccatcagtggacaataaaggtcatggccggggcaccaatcatcacctttccagtcctccacgtggacctgggcctgcatacgttaatcttttcaattttcttcttgatttagtggaagcagtcagagcaaaactggcctgaacattggctgcaaagcttcctcacagaagttcaactatagtgggcaagtggctgcctggactccacggctcagttcaccaaaatccgtttacaggagaaagggcctcctcagcgcagtctcagagatggagaatctcccttatgcagaaaagacttcctgagctgggtatgctggttattgttggcatctgttccatgcattggtgctgctgggcggacctctcccccaagcctctatctgtacacgctattgtgtatctgaagccctactagtcttggtagagcagagtggttatgaagaggcaggagctttcaaattcaactatctctggcactttttaactgggtgattgatcttgggcgcatttaactcaaactctctggacccccacgtattcatctataaactgaagataattaaagaacctgttttatagggctgtcatgagaattaatgagataagctacagcaagttcttgttacaatagaaagtacaaaatccagcttgcattttgttacttactaacccaatttgttatttattcacccaattgtctgagctaacttctgaacctctgtaaatattcgcttctctcttcattcctgctctatttatctaattgtccctattttctgttcatctttatcatagaaaatctctgtaatccatcacctttttaccactgggtgggaatcaggcctcaccatgtctgtgggtcctgccttccaccctctaccccttctctgtcctgtctttctcagcctcattggagttgttttctaaaacacagaattggtcatgccgaattggacaacaaactttctcactgtgagatttcagaaggggaaattggaaggcaatttaccaattgttattttgatgaaacgcccccaaacttttgatttccacgggtgtttcattcacagaaagtctcattatctcaagcctagtgtactactgttggatgcatgttacctttatgtattatgttatccaacaacaatgcaccgggcttgagataatgggttttatgtattcctagagggtactggagtaattcttagcggagtctatttgtgttgacacttgtcttttgctaggatacagaatctacagatgagacatacattttctggagtcatatatactttctcacgtgcttttgtcatttgttcccaatgatatctttcagtatttttattgattttgttggtataatagaatgttttacattaatattatgtcagtgattattatttattaatttatataattagtatgatgtacacatataattagtatgatgcataataatctatcatatggatgtgccataatttttttaacattaccatattgttgatcattaagataatttcagattacctgatattatgataatgttgtaaatagtagtgttgttcataattttttgtctatgttaatgattattttcggaataacttattgacaaatattaaccaaatatttaaaccttggtttaatgaaaaaattatttcatgtcagctaacagtcatgttactctcctaggtagaatgttgatatccttttcatcaccatgaactaaatccagggcccattaacatggcgtccaaggtgtgttatgatggatagtccagtcctctctttcatcatttcactaacgaggacttttctttcttgttcatttcctggattttcccccatttaacatcatgacattttcctatgccattaaaatttattgtaaaatgtcttttccttccttccttccttctttccttccttccttccttccttccttccttccttccttccttccttccttccttcctttctttctttctttcgttgttttttgatggagagtctcactcggtcacccaggctagagtgcagtggtgcgatctcagctcactggctcactgcaacctctgcctaccaggttcaagtgattctcctgcctaagcctcccaagtggctgggattacaggcacacgccactatgcctggctaatttttgtatctttagtagagatgggggggtttgccatgatggccaggctgctctcgaacccctgacctcaagtgatccacctgcctcggccttccaaagtgcaggaattacaggcatgagccattgtgcccgacctgaaatgttattttcatagctgcataataatctatcatatggatatgtcataattttttaacattaccatattgttgatcattaagataatttcagattacctgatattatgataatgttgtaaagagtagtgttgttcataattttttgtctacgttaataattatttttggaataacttattgacaaacaaataattcttacaatagcaactgatggcagactgcagtggggcacagatgtatctgacaacaaagagaccctccagtggggccatgcaggaggagagacaagagaagacaggggacaagtctgtgtcaatagcttcccacccataattctaccccctcatcccccatccctgaagctgagttcctaggtgaactgaggctgtcctttcagtggtcactccagaaacgaacctggttttggagtggctgaatggccgctgccatggtctcatactgaaggatttgatggggccactgtgagatccagtacattgcccttgaccctttctgactctgatttacatttttctacttagtgagtcttttcttccttcccttcttcctttcctccttttctgcctcctggtctccctacccccatccttttaacaaacatggacctaataagtgcttagcagtgtgctaggtagaggaacccagatataaataagacacagcccctgccgagaggggtgagcctcatcactggcaggacgcagtcaagaatgcctgcttccacccctgactcccagctatccctgtgctcgtatcgccctatgtcctcttcctttggggtagctacactatcaataccccagctcttcccctttgctttactccaagatgagtgagtatccaagttattgttgccactatgaacatcattattaataaactaaataactatatcagcattaccaacagtgcaatatccccctctgccacatctcacagtcattattatacctccttttattatttctccacccaggagctgttcagacaattaaaatccagtaataagaacaaagaataattaaaataacaccaagaacaacagaaatgtgatgacaaatactgaaaaatctgaggaaacataaccaaggggctaacttcacagtgacaggtgctaacaagatcaacgaggaatatgtgacaaaatccttcctgagaacttgaaaattctttccatctgactcaatggcctttttgccactgaggtctccagaggtgctagattgtataacaacttatttagctgatcctgccaaaaacgtgttgcaaggcggaggggggaaagatgaggaaaagcaaacgttttcataatgaaagccaaactgaaaactatttctcctctggctagatgttggcaaagctccaaggcactcttcacagctgcccaggtcctggagaaagctttgtggtatttaaatggggttcccacttcatttcccccatcttctatgctcgcttataggttttgaccctcagtgcctccatcggaaacatagatgtaatgttcagtatacagttcacgagaaaagccaagtacaatgtgtttttatatccaaaatatgcaatagagaagtgacagtcattgtggtgtagttaaagtcattgtgatgaaacacacaggtgtgaaaaaccagggggatgtgtggggttgtattgtctgaaacaaaatcaggtggaacaaataagaaagagctagaataggctagtcttgttccacatatgccccgacaaagtgtttttgagtttgagcaagaatacatcactgagttctacctttgatagatgctaaaccgccacctgtgtttccatggtgttctgtggttttgttgggtgcttccatgccccttagctcagtcgctctttccatggttccttcagcaaagatcgatgtgtccaggcccacactgtggtggaaagaacacaggagtgggagtcagaagcctgtgccgttccttagatttccattcataaggtgtgtgtgtgtgtgtgtgtgtgtgtgtgtgtgtgtgtgtataaaaaaatatatggagtcttgctttgtctcactgcaacctccacctccctgttaaagagattcacgtgcctcagcctcccgagtagctgggattagaggtgcacaccaacacacctggctactttttgtatttttagtagagacagggttttgccatgttggccaggctggtctcaaactcctggcctcaagtgatcctcccgtctcagtttcccaaagtgctgagattacaggtgtgagccaccacacccagcctcatgagataaatattaagaaacaaaggcctaagaaggtgacttgtccaaagtcacctgcctcagtggccctggactccccgaaccttctacagctagtactagaatccagtgttagttctacgccatcaagctacttggtatccaaaatgtcatggaagtagtcacagctctccttcacacagtcatgggcacctctccctgccttccagtaaccctccaggcttcttctactgctggggaaaatgttcacacattcaaaagtccttagcaaacacagtatagtaggtgcctctaaaaaccacattatctgtctgaggtccaaactcttctccacttacaaagctctgtggtgcccggtgggaggcgtagccctttctgccctttctgccaatcagcccaaattcagctgcttctcaaatggatctcactttctgttccatcttatttgacacttcatcagctggagatggctcagagatggtttaatgttagctccatatctgccaaaaacctctcactccttggcaaggcagccaaggacacaataagagagaaaaagaggtagatgatgagcgtaactcaactttggtaaaaatagtgcagacatttccgcagcttctcttagggtggcataaggggagacgagggagacagaaagggaaggatgaatgaggagagaggtgtcatccctgcttccagcctggaaggagcttcatttatctgcgttgagaattcagtgttgatccatcacatttgcacatgttattgtcacatacgtttactttaaaacatgccatccttaatggaggatgactatgcagggagcaatgccattgcaagagtctcatacagtgactctcctcagggggcttagaatcatgcctgctccttcataggcatggcggtgctgtacatttatttagcacgctgctacttctggatgtcaagctgtcaggctaatggtgtcaagggcagggagggaatggacagttactgggttctgatggatctggcatcttgtgaggcatcccacatagaagagctcatttaacggaagagaattggtcttgtgaggtgagctccaaccactctgtgcaataaaggctgaggaaggaaacaaagtggctggaatgattccaagtgaattggaagggtcgaagcagagccacagatgcagggatggtggatctcacctctctgtcttaaaagaaccaccttcagcctggaccacaagcagcagagatcaagaagaacctttgttctgaagttcagttagcacatttgttccacttcccttctcagtagaagagaaaccattcatgttatttgttttactgtatgtctatttttatctggtataaactgtgttgatttttcggcattttcttatttgttatttcatttgccctccagaactcagcagagggcaccaaacatcattttacttcctcctccctgtttctgggggaagatgaatagatctgggttttgcaatgtccgtgctctctgctccgtctcccttctctctttcgccttctttatgtgcctctgccttctcgcctaaccttgcctctgcaaatatcttccgcttggaatccgactcttgatttctgccctggagtgagcaggaggcaggatgggggtgggtagaaaatattcccactctcctcaaactctgtcaaaaatataaatgcccagtacaaggttgacaccgcgggccccaggttgccattctctatattttccttcctttgtcctatttggtttctgaagttaaatggtctcttttttgatatgaaaattaatttctggacaaaaagaaatatgcctgcacaggggccaaatttgtgttgtctcccagcacggctgtaattacactgtagatcaaactgacgccttagttttcagtggcttttttccctctccgatgtccctgaagttgccaggctcaccaagagcagcagttttcattagcagcaaagccaggggatggggatggatggccggggccagccctcactcctgggtttctctcctcaaattcttcttttggatggacatgtgcaatccaggccaatgcagagaactgcaggactcagggtcctgagttgcttgccacagtgtgggggtgaatggcggtggctctggggtacccctcatcctatgggtttcaccctgtggaacaggcactaccaggcttctcttttaagtgtcagacacaagaagggtctcacacatttcccatggtctctacacatttcccattacctttgtgcccagcagaaatctgtgttcacctgctaaaaatggtcactgtgaattagtatcaagctaagaacttgtgaaatagggcagaaccaatgcaaaattttccggagtcatgaaagtgaagtggcttttacactgcattcaatattgtgagttctagaggaattttcagggaaactgtggctcccttcttatcctaactttcatagtcaattctcgattgcccatacatagctccactattgtttgttgggtataattagacactatgttctgtggccctcaggtggacatctatgctttgccaataagccatgaattactccccagagaagcttatgtgattttgacatctacaaggtgaatgcaaactatttattcacaatgtgatgggcattccttcaatttccctataatatgttgaatgtaaatgatttgtacgtggagagaggagtgcttggtcagacttcatatgtcagaaagtcaacctgggtggtgtgaacaactcccgtcaaatgagtcaaagccccagaatgagattctatggtctcttggattgaacttggggccaagggatgtgggctttgatccctgcagctttgtcactggccctgagtggccattcatctaatttttccatctgccaagtgaagcaacaatccctcccactgccaagcttacagtcacattataaagatgattgagattccatgcctcagtggacttcaggaggaaaagtgttaccctctaaatccttcctcacactcccacacccacaagttttctttttttttttttaaagagtccagtgttaatagtgttttgactgctttcaagatatcaaaacagcttttgttggaatgaaataaacaaaagaagatgggttttggaacagagcattttaaggttcaaatttcaactttatcacgtatgagtattataagtcagttactcacactcttggaactttattttcctcatctgaaaagtgaggataataatggctcccttgaaaggccgcagggataatgagctgccattattgcatcagtgcaattccagcatagtgagaaaggtttgtgtctcttagctgctttctgaccggatggcaagcctctcctcaccccacactggccgccgttggcatacctatgtgcatgctctgtcctccgcggttcctgtggagaactctaaaagtcagggaagctcagtgccacgttttggaacttgtcagccatagagcaacctacctatttacttccagtggatgaatgggaaggtattgctgtatcacataaggactctcctagggagggcagtgttagcagcatgaaaagagggacattccagtgtcacacaaagtcccagatgggaaacggcagttgccaaaggcagcctgaagtgctgcgttctcttcgctcttcaaatgcagacaggtctatagcagcagcttgaagatgaagaccctggaaaaccatgagcaagggggcctcaaaatgacagggaaacaccaacaatgaggagggagctaaacgcacagtctcttacacccaggagtgtgattatctgacattttggtttaatgaaaaaatcaatagttttggagccaagcgtgggtttgaagcttcgctctgacactttactgcgcagattgctgagtaagttactttggtcaccgactctcagttttcttatttacaatactgggataatgcctcactcgcagggctgatgaatgagatcacagtggtgtggtggaaagcatgggctacgttgtaagagtgtattcaattcccagcctcactggttacacttctgggtctttaggagagctgccggcatccatgtgcctcgatttccacattgtaaaataagggtaataactgttgcctgtctcaaggggtgttgtgagggttatgtatggagcacataaggagtctaaggtgcacaaaatgaatactcacaatgaacgctcaacaaatagttccatttttaaattaataaatggctgttagtaatattattattttattagttttagcttattatccacaaaatagttcttacctactaattggacaagggtaggacactaattaaacgatgtgtgtcatttttgatggctcacactaaaatccatagaaaagtgtttattttcttcaattttttttcttgactctggggtttctgtccttctaatccatgagtctctctctgtctctgtctggggtttctgtccttctaatccatgagtctctctctgtctctgtctgtctccttctttcctctccatgcagtaaaacagagctgcaggcagtcaatttcgagtcagtgggctgtgaaaagcagttagaataatagtttattgaccctgaatgtggcagctggaactgagggtcggctgggctcaggcacagtgtaatggtcacaatagaagtttgatcatctttgatcatttccttggactttaagagagaaggtgttgccaggcatggtggctcacgcctgtaatcccagcactttgggaggccgaggcgtacagatcacaggtcaggagtttcagactagcccgaccaacatggtaaaaccccgtctctgctaaaactagaaaaattaaccgggcatggtggcaagtgcctgtaatcccagctacttgggaggctgaggcaggagaattgtttgaacccgggaggcggaggctgcagtgagaagagattgcaccactgcactccagcctgggcaacagagcaagaccccgttgagagagagagagagagagagagagagagagagagagagagagagatgttttttggagcctgggagcacctccaaatagcccaagtccaggggcggtagcctacccagaaggggctgggtttggttggaaggagataagtggaggagggcaggatgagggcctgagttctgtaccacttgtgggagtggagccttcatcactgggggtctgagtgcctgagcacgagggatgctgatccccatttcaaatgtgtcccaagcatagacatgcgctctgttttctcagattacctttggaagctggacttttctcctaagcactgcagtgatatgccttcttattcactctggtgatcatggattttccggtagaaatgtaattataaataaaaagtacatcttcaaactactttaatacttccatattagaagcaatttgtttgtaagtggaattattaataaaaacatagttgaaagcagagactaaggaaattcaaagagaaagaggagaacatgaatatataaataaaggatggcctatatttttacataatttgtgaattaaaaaatagaaatgtattgtcatagactgtataaactcatgcttccttcgatagctcagctggtagagcagaggactgtcgaagacacggaatcaacctaaacgtccatcagtggtagattggataaagaaaatgtggtacatacgcaccatagaatactatgtagccataataaggactgagatcatgtcctttgccggaccatcaatggagctggaggccattatccttagcaagctaacacaggaacagaaaaccaaataccgcatgttttcacgtatgagtaggagctaaatgatgagaacacagagacacagaagagaacaacacacactggggcctattggagggtggaggctgggaggtgggtgaggaccaggaaaaataactaatggataccaggcttaatacctgggtgttgaagtaatctgtacaaccaatccccatgacacaagtttacctatgtaacagagctgtgcatgcacccctgaacttaaaagtcaaaagataaaaaataaaagaatacataaactcaaaatgtgtaaattctgggcaaattttgtcatggcctttggaaaacatttccaaacaataacttgttactttattttacaagtcacatgtttatttcattgctcgtgttggaatttattcattttatgatcctttggttctatttatattgtgataaagactataaaaatgactttttttttctttttgaaagaaatcaccaatacagataaaaagcatacaaatatcatttggtatttgtaatctgaattatgatacagtttttctattggactggaaaaataacctttgtgaattacatagaatctatgattttaggcaagctgtttccagtattaaagagcacttatgtcaattgtaatatgttgtgagttatttgttttcatttaatgtctttttatttaaaatagggaaagtctggtaaacaagctgctcaactaaaattaaaaaattttcttattaaataaccaatgtaaatagaatcaaatgctatgggagaaacagaaagaaagcataatgcatttaagaagaaaagaatctaggtgaagggcaagaatatagaaataaaatcatattttgtttttcagaacaacaatgcagcaagtgtacacattaaatctgcatgaactgaatgtggaaacgcttgtctactgaggagataagtgaaggggggcctcttaaggttgacatgagcgcccaatagattcaacttcacttttatcagctgttcatgcatttatgtcaaccacctgaggtctttagctttgtttgattgttcagttcaattattgcaagaaaggagttcagaaaataagctttatttatttttctctctcataatgtatgccattgtctcaacaaaagttgggactttagacatatatttaacagacctgaacacaaagacttaacaagttgtttctttattattaaccctttcctaattgtgcatttcactggttattgttaatggttttttttttttcaaattttagagataataattcttgattaagatatgtccatttccagtgtctggtagttatttaagaaataattttgatagagataatatagaagtggaaataaaatgtagaagcctattgtgaagtttatctttagaaagttttcattaaaaaacttattttccagaaatcagatgtggtgtgtttctgcaagaattatgaaacaaaataaaaccaaataaattataccactagaaccttcatagtactcttcctaaaaggaataattcaccatgcatattttaaaagtgttcaggatcatagattcaattaaatttaattgccatatgtggagttcctactaagtggtcggccagaatgaaggcatatcaggcagagttatgacttaccaactctgcaaatacacctgcaagctactgcacctgtggctttccttccatagctcaaggaaaataggcaaaaagcaataagaataggaggtcgtgtgaaacagtgaaagcagccattcttattcttttgaaattgtgtacatccttcagcataatacagacaaactagagttttgatgtatccagtacttgggagaagagctattgtatccagtacaattccccaatgcatattttaccatttagtctattcattctggaacctggaccaaatgtatactttgtggttatttccatttttcttatggcatattgtgataccaataatctatcatcaaattagttcttaagatgagacccaaatgaccatttatgctagaaactcttgatattccaaaattagcccatacttgagaagcaggtcctattttgcttcctgtctttggggacagcaactttctctgtaacttgaagcatgtctcttaacctttcctgatttccccatctgtgaattagaggtaattattcctaattttaaggagccattgagaggattaatttgttagtgtttgtaaagtactttagatatgtaaagtgctaagtattactaaattccatacaaataatttgcaatttaacatctaaagggactgaataattgactttattcttgtagactatattcttataatattttagcaaatctgcaaatacatgtttttcccatctaacatttgtacagagattattattgtttgtaatacagaacatgcaaatcaacccctccttcctactcaagttaataaaaacataaaaggaatgactgtcattagaagcaaagtatcctgggggaaagtatctcccaattttaaaaattgctggcaattcccttttcaagcagtctgcggaaaagctgtcaggagaggtaaaaggaagaaagaagaagtctattaaggaattggatatgggttagaaaattaatgttttttttaaaaaaaagatgaatttcctaattgtgttgttcctggactctgaaacaattttagtaaacaagcacaagtgtcctctgcagttatttaaggacagactacatacttaccctcaaacccagtttattcaggatgcaggaatagaatatggaactaactggactctccttagccccaaagatgctcaaatcccagttgttgtgtattcctctgacataatcccaccacaccggtgtgtcagtgcagcgttcgtatcacatctgaatcgctggataccgactaaatattagacagttgtgggctgctagctgcatctgcatttacctcctgggcaaatgcaagcactttgagtgctgacgcagaagggttagacagagctgcaaatggtgattcaactggagccgcttgtggtgtttataaagggatgtcagtcctaaaacaaactctgacacacagaggcctggacttccactggggttgtgctgacttgctctctgattgatggtgctaccagaaaccactttatggagttatagccttgggtgacaatgattatggcttgtaatactggggctgtatttcctcgagctttccctgtaggacttggagggattcctaaagagaacagaatgcctgtcccctacacagggaatgaggaggtgccattcagggaggctgagccgggacaggtgaagggcactgctctcagtctcctcatcttttaactggggagggttatcaaaacctgccttgcaagatgaggccaaagtgatggaataacttggaaggtgttgaaaagtgtaaaagccctgtgcaaacattgtagtatcagaatcgctatttttgcttgatcggagccttttccctggcttagtacagctttcggccccatcattccgccctcatcttccttggtttccgaattactagaacaaggggtcagtgacacatattgaaaggatcagaggactggagttgaagtcctgactcatcacttcctgagttgctctcgtggccttagccaagtcacttcatcttagaaattccattttgttacttgtaaaattggggcaaaatatctaacctatagtaggtggtgagaaaaaaaaatgagacaaatgagacatctattttattataaagcattatacaaatatgttaggatgattataaatatttcttgggaaatatttctagctcttagggaagctaactcctttacagagaataagagaagttgtagcactaaaataaatccttttcagtctgcaaaaaacccctgtttaattcaccgaaagaagcatttcaaggaaatatgctcattctccagcctgtgtccctctttctgctgccccctttatcacgtgcgctggtgggaggctgccaacaaaagaacagggccctgtgaggggaggcaggggtgttcccaaccctcagcctggccatcgtccgtctgtccaggaatgtttcctttaccctctttgtgggagtcgtcatcctctcctactgccatggatataatcagaaggaccgtgaaggtagatgtggtggggaaaacaacaacaaaaatcctcccgccgaaggtgactttcagggctggtgagatttaattcatttccctgtggcaaccatcagggacggacatctttcacgggctggttgggtacatttcttacatgctggcgggatttggacgcatgctgtgccgctctttttcaacgccggaaaagtaaaacattgcccaatggggagctctccactgacttgtgtgtaggaaaatgatgtagccaaattggtgtggcggaagttttacagagaggaaagcaggaagcggcaaagagaaggaagacagatgctcatgaatacgtttttccattatgttcccaggcactaagtttgcctttcttgatccttacggtataattttccagatcaagataagcattaagcatgttgtctgtctcctcctgtacaatttgcagtttcaggttatgctcagattgatagaactgtgagtatgcagagacattaataagcctatgcatttaaataacctttatcttccaaggagctcagttttataaatgatgggacattgctatttttttttcctgcttcatatgcttggcatttttataaaactttgaatttcagtatcatccttcatgagtctagtgtaccctccgaaaaaggcagcgatgtcaacaaattattataacaatgagtcagtgataccgaaaagaatcagaggactggagctgaggtcctcacatgtcacttatcaatttgctgtagtagtcatagccatgttacttaatcttagaaactcaattttgatacctgtaaaattggtgtaaaaatatctaacatatacctttgtggtgaagaagaaaaatgacatacatattttttaataaagcattctgttatacatatatgttaagattatgataagcctttcttagaagccactgcataccttaggagcaatttattttttatactaatatgctagagggaaactaaggcacagatggaaaatgtgcttctcactactacaatctataaatcaacaactccccaaactctatgtgcagtcaaactgtcctatgaacttacaactcactctttgaattgccagctgaataacccacgagcacccaagcttagcatctcttctgaatttcctcacaatcctcctcctccacctgagtctttctgcagaagctgttctctcttccagttgctagcacacatatctgtgcctttgggttgtgtctcctaaatctttctcccatcagccttttgcttgccattcaagctaccaacatcttaatgaagttcctcctgtgtccctattaaatgcaatagctttgtagctggactctcggccttcgttgttctccttccatacccctgaaatcatcttccacatctgagatgagtggtgtaaataaaatgcaaaataaaccatgttgcttctaaatgtcaaacagttctgtggggccacatggaccataggatgatctcaagcttttctggatcttgggatccagagagccttgtatcacatgacttcttaaatgtctgccactgccagtcctgcctctcactggaactgccagcaacagcaagggaatttcctgaaagctccatgcaattttttcatgtctctgccattgacattgtattgtctttgcatagaatcccctccccgtgttccttagcttgacaagctcctcgttatcctgtgatcccaggaatgtctccaccaggacacaaccaacacatcaccaccgtgtcaccatgactgacaacaggccctccactgtactcgccgggcaccacatagcacctgccattgtgcattgtgacttcagtattacctgatacatctttcttagcagaatccattacttgtgtacaagaagcgttgatggtactgttcatatgagataaaggtgccataagctaaatgtgttcaattaggtattagaattgtacatgcttggtcatatagtcactcaaccaagtctgttaagggtttactatgtgccttatattctagtaggttctgggtattgtagtggcaaagtggttcttggttaggcgtccaggtcatgtatcatgtagtacatgacggtggacacacacttgccacgcagtcaccaggactgtggacattgtctgaaaatagtggcagagcagcagataattctggattctcaccggcaggggtcagtgcagctaagcagacgccgcacagccggctaacttggaaagacattaggagcttggtcttgaattaataccattctaaacgttttctatttatatgtgaaaattcacatttctttgccttttgggaccaggctagatctattcattctcctttaatggctttgtaaacactgtgccttccatgacctgccccctcctccctgtgcccatccactgcctcttactccatgaagtgattttattttgaatgtattcgtttcctataagaagagagcctctgagtgaatcacacatcggttcaaatgaccttctgttttgagaatgttcccaggggggtgcaattcttttaatttatttaatccgatgtgctttttcagaatggctctcctctgcaaaacagatgggaggggactgcctggcactacttctctttctctccactaccctggaggcttggcctctgggcagaaagcttgcaggagtgtatgggactggacggttcccagtgccaggcggccctgctttcctcacagcatgggggcttttgacatcagaggggccccggctcggcctttctcttgggtgtacctctgtggcctgcctcctcattttgttcacacagaaaagaaaggacatagagtagcatatgtcctcagcacttagatcatgaccattgcacttaaataatcaacactctttgggcactgtgataaatcaacagttgaaacaggagtgggcactggagaagctacaacagatgcagccaactttacttccggatgaagttgttctgaatcaactcagtactggaaatcataaagtgatcaggagtgtggcagtacagatcacagggacctgggtttcaaccctggcttagccacttcctaagaatgtgagcttggaccgatgaagatgtataagccacactttcctggcatgtaataagggaatgatacagatatccactcccagggctgctatgaagaggaaatgacatagagcttacaaagtgctcagagctgtgtctggcacagagtgagcatctaaaaatggcaagaagaatgcatgtcattatgacatttacaggctatatgctacaggcaaatcattatttttcttttaataattgaaggaatttgacttgttaggtggtccctaccttgatcccttagcccctgggacacacctctgttgttgacgtatgtccctgcattgtcactgtttttttgtttgttttcttttgttttgtttgacatggaattttgctcttgtcacccaggctggagtgcaatggcatggtctcagctcactgcaacctctgccttccaggttcaagagattctcctgcttcagcctcccaagtagctgggatgacaggtgcccaccaccatgctcagataattttttctatttttagtagagacagggtttcactatgctggtcaggctggtctcaaactcctaacctcaggtgatttgccctcctcagcctcccaaagtgctgggattacaggcatcatcgttttatgtagaggataccaggacatttccctgtcagctgtgcagggcagacaccgaatcttaaacatttctgtgtttctcgcattgggcagagttcctggatgcagcagttgctccgagaatgccagatgaaagcaagctgggcatgctgtctgggaaccctgtgagccttgggtttcccctgaccttaggtggaaagccattaggcacctgcttacactcaacggagagaaagcactcatcccctaacgttatcatttctctctaagtctgtctttccaaatacttaccttgcatttattttagagagagaactctttttattttattcctgagattgggtgttgccacctttgtccaggatctacacatctgtgtgtggtgtccctggatcctccttggtgtctccttagagactctaagttatggccttcagtcacatgtacattgccacatacccatgtgttttcattgccaggcaaagtgtcattctggcaacaagctcctcacctccttccccagagcttgccacactggcctgccataacagttactggagccactgcagggtgcctggttccaaccaccatacaggtcttttttctctccacttggtgcctccatcagaccaattgctcaagccagagaccaagtggcctcctgaccaccccctttgctacaatcctggcatctaagtcattattaaatcctgttgatttcatctccaaaatgcatcttgaattttttcatttccgctttccaccacagcccaccacttggtcatttctgtgtaaccacagcaatagactctgactagcatctcactctgccatcatctcagtcactctcattgctggagcctaggtgagattttgaaagcctgaatgagcctgtgcttctcctgtttacctagcggtgactttctattccactttggatccaatcctaagcgcttcccaggccttgtggagctctgtggtgtccggggatgcctgctctctctcctcaccacaggcctcctcccctgcctcggtgtttccaatcccaggggcctgcatccaggctgagaggacagcattagcccacctccaccctgagactcccacatggggctttttctccatctggaagaagcctccactcaccccacggccactttctcccaccctcctaatcactcttcaggccatttgggatgcccttcttattgcctatcccctgatatcctctctcagtgtgatctatttattttttaaattatacttatgggccaggcaaggtggctcacacttgtaatcccagcactttggcaggccaaggcaggcggatcacaagttcaggagattgagaccatcctggccaacatggtgaaaccccgtctctactaaaataaaaaataaataaataaataaataaaaaggctgggcacggtggctcacgccaccgtgtaatcccagcacttcgggaggctgaggtgggcggatcacgaggtcaggggatcgagaccatcctggctaacacggtgaaaccccgtctccattaaaaatacaaaaaattagccgggcgcggtggcgggcacctgtagtcccagctactcgggaggctgaggcaggagaatggcgtgaacctgggaggcggagcttgcagtgggccgagatactgccactgcactctggcctgggcaaaagagcaagactccgtctcaaaaaaaaaaaaaaaagaaaattagctggacatggtggcatgtgccagtagtcctagctactcgagaggctgaggcaggaaaatcgcttgaacccgggaggcagaggttgcagtgagccaagatggcactgctgcactccagcctgctgacagagcaagattccgtccccccctcacccccccccaaaatatatacttattaccatttgtagctatataattatactcatgtgtttgtttaacatctgcctcacacatttgattataagctccataacgggccaagatcatatctgtgacttatatctgtgacttgccattttagactcagtggctgtagtgtgatacctgacacgacactgatgctcaaaaaattgcttcataaatgcagaagccaacattgacgtaattttccagaatattttaatactcaattgacctcagggaaatgcaaaccaaaaccactaagataccattgcacacctatgataatggctagaagttgaaagattgatggtaaccaactgttggggaggatatagagccactgtaactgtcacacactgatggtaagaatggaaaatgctagaaccactttgaaaagttgtatgttttaaccccatcaaaaagtgggcgaaggatatgaacagacacttctctaaagaagacatttatgcagccaaaagacacatgaaaaaatgctcatcatcactgaccatcagagaaatgcaaatcaaaaccacaatgagataccatctcacaccagttagaatgacgatcattaaaaagtcaggaaacaacaggtgctggagaggatgtggagaaataggaacacttttacatcgctggtgggactgtaaactagttcaaccattgtggaagtcagtgtggcgattcctcagggatctagagctagaaataccatttgattcagcaatcccattactgggtatatacccaaaggattataaatcacgttgctataaagacacatgcacatgtatgtttattgcagcactattcacaatagcaaagacttggaaccaacccaaatgtccaacaatgatagactggattaagaaaatgtggcacatacatatgtagaaagctgaaactggatcccttccttacaccttatacaaaaattaattcaagattgattaaagacttaaacgttagccctaaaaccacaaaaaccctagaagaaaaccgcgcattaccattcagggcataggcatgagcaaggacttcatgtctaaaacaccaaaagcaatggcaacaaaagacaaaattgacaaatgggatctaattaaactaaagagcttctgcacagcaaaagaaactaccatcagagtgaacaggcaacctacaaaatgggagaaaattttctcaacctacccatctgacaaagggctaatatccagaatctacaatgagcacaaacaaatttacaagaaaaaaacaaacaaccccatcaaaaagtgggcaaaggacatgaacagacacttctcaaaagaagacatttatgcagccaaaaaacacatgaaaaaatgctcaccatcactggccatcagagaaatgcaaatcaaaacaacaatgagataccatctcacaccagttagaatggcaatcattaaaaagtcaggtaacaacaggtgctggagaggatatggagaaataggaacacttttacactgttggtgggactgtaaactagttcaaccattgtggaagtcagtgtggcgattcctcagggatctagaactagaaataccatttgacccagccatcccattactgggtatataaccaaaaggactataaatcatgctgctataaagacacatgcacacctatatttattgcagctctattcacaatagcaaagacttggaaccaacccaaatgtccaacaatgatagactggattaagaaaatgtggcacatatacaccatggaatactatgcagccataaaaagtgatgagttcatgtcctttgtagggacatggatgaaattggaaatcatcattctcagtaaactatcccaagaacaaaaaaccaaacactgcatattctcactcataggtgggaattgaacaatgagaacacatggacacaggaaggggaacatcacactctggggactgttgtggggtggttggaggggtgagggatagcattaggagatatacctaatgctaaatgacgaattaatgggtgcagcacaccagcatggcacatgtatacatatgtaactaacctgcacattgtgcacatgtaccctaaaacttaaagtataataataataaaattaaaaaaagaaaatgtggcacatatacaccatggaatactatgcagccataaaaagtgatgagttcttgtcctttgtagtgacttggatgaagctggaaaccatcattctcagcaaactactgcaaggacaaaaaaccaaacaccgcatgttctcactcataggtgggaattgaacaatgagaacacatggacacaggaaggggaatatcacacaccggggcctgttgtggggtggggggagggggaagggatagcatttggaaatatacctaatgttaaatgacgagttactgggtgcagcacaccaacatgacacatgtatacatatgtaactaacctgcacgttgtgcacatgtaccctaaaacttaaagtataatttaaaaaaaaaagaaaaaagaaaagttgtatgttttttccttataaagttaaatacatggggctgggcgtggtggtgtgtgcctgtaatcccagcactttgggaggccaaggcaggcagatcacttgaggtcaggagttcgagaccagcctggccaacatggcgaaaccccgtctccactaaacatacaaaaattagctgggcatagtggcgcatatctgtaatcccagctacttgggaggctgaggcaagagaattgcttgaacctggaagacagaggttgcagtgagccgagattgcaccactgcactccagcctgggcaacagagtgagaccccaactccaaaaaaaaaaaaatgctaaacacacaactaccatataacccaaccatttcacatcttggtatttgtctaagacagataaaatcatatgtctacatagagacttgtacacaaatgttcatagcagctttatttatattagccaaatttgaaaacaatccatgttcatcaacagatgagtggataaacaattaacagtaaatccaaacaatgaaatatgactcagcagtaaaaaggaatgcgctattgatacaagcaacaatgtagatgaactcacaccatcacgatgagaggaaaaggccagatccagaagagtacagatggcaaaactctacgattccatttttatgaaattctaggaaaggcaaaactaatctaaagtgacagaaagcagaaatgtgaaggtctggggctaaagagccttgggtattgatggcaggaagcatgaggtaactttctgggacagtgagagtgtcattctgatgagggtagtggttacacagatgtaatattcatcaaaacttattgagccacatcactaaatggatacattttattgtatataagttatacaataaaaattggtttaaaaacctcagttgaacacagcatggcacacaagttttgagtgtgtatgtatactgaatatttatatatgaaaggtacaatgtttcactcttggcctagcaggaatcccaatgaccctgggggtgaagactggcaagggagtggaagggagaacaatgaccttccccttgactgtattttcagtttaccaaagcaaagtgaagcttgggctcaagacattaagatacagatggaccgcatgcagggccaaaaaatactggatgaccagctaaattctaatttctgaataaacaataagtagttttagtataagtatgtcccatgcaatatttgggacatatatttttattaaaatatttagccatctgaaattcaaatttaactgggcatcctgtatttttatttccaaaacttggcaacttttccagcatggtgtattatcaccaggatgttcaaattcatgtgtggaaggattttcttttgaacatgttttgcattttataaagctattcacatagaaaatagggagcaacactctatagtgaaagtaatgtggattttagagtaaatcagaccttgattctaactccaactttgtctcctaattcattctgaagctttggccaaattgcttaacatgtctgcaaagtaagcataataacctctaactcaaaattttattcgaggagaggcaatagaagcattagcttccttgaatcaggaggactgtctgtctcctttcccactgcttctctgcattggccaggagatatcactgtcctaacttctggaaacaatttaaaattgtgaggcctggacaggagacaagagaagctccttgccagcattggctctaattctgaaagggctcctgggttgcatctgagctatcaccatcaataccccacactctcattggtgttagtgaagggcaggtgttatgtcagtggtggtaggaagggggaagtcatgtcatttttactgtctgctaatgcttcttaaggaaaagaaaggaggcacagaagtgaggaagaatagcggtggaggtactccagacaaattggaagggatctcctcttgttaaagaattgcaggcggggcgtggtgacacacctgtaattccagcattttgggaggccaaggcaagaggaccacttgagcccgggagttcaagaccagcctgggcaacatagaaagaccttgtctgggaggctgaggcaggtcaattgcttgaactctggagacggaggttgcagtgagccgagatcacgccactgcactccagcctgggcaacagagtgagactccatctcaaaaaaaaaaaaaaattagctgagtctggtggtatgcacttgtggtcccagctactggggaggctgaggtgggaggttggcttgagtcctggagatccaggcggtggtgagctgtgatcacagcactgcactccaacttgggtggtgacagagcaagacctctgtctcacacacaaaaaattgctataatcagggattatctcatctcaggaaaaagaggaaattatgttcaagatgaagagagaaaacgggctagtcatctgatttactttacctgaccataacacatagtcctagggtactgggtgaaatttatggccagtaaattcccagctattaaaaggaaacgcttctttgtctgctatgcagttgacctccgaggaagatcagtgaagcagaatcagggactatgtttagaaacgggatccagcaattttatgattcataaaaacttggctgatgatgtggcttagagcaagggcctcaaatgccacctcagagccctgagccacatcccatgccttcagcaggggcagcctgtctttgggatgctgctcctaattccatacattatctccttcaaggaaaggggcgtcatctccgaaacagctacatctcctttgtgattccagtttccacccaataggcccagtgcagtgactccagctccttccaggtagctgcagctcttgccaccagaaagatcacttctttctttggttcttcagtcttaggcctgatggagatgtcctgtcattgctaatctctgtgtagtctcatcatctctttcacttctctggaggctttgtaaccaattctcttaccaaattccttctactggagtcatgcatggactccaactgtctagctcttcaacgatataccaggtcacaccgttttcccaaggggttttaacctgtcaccctaaataggactgatatgtagctgcacagtctaggcaaacatgagtgaaagaagatttgggcactgattctcttcctgcccttctagaacccatttccaggcgtgttaggtccatattcaatgccaggtgagacggggctgagtaaacagaggtttccattagctcaggggaagtggaaagtatcaagccctgacatcgtccactggagacactgatgtgagttgaagttaaatcctcagatggttattattattatgtttgtttttttcttaacaggatgctattcccaaggtatacatataaaagcaggattcaaagtcatctaattattatacaaagaaacaaccagagtaaaagtagtgggatgaagattagtaaaatgtgccagaattgaggaaagaaacccaccccaacattagaatgcaaagaacgttttaaaaatgccattatggaaagtatattctagggataaaatggataagtagataaaagatttaatgtttagctattattctactaacttcaaattttcaacagaactccattgaatagtctatgtttctaaatggagcatatttcgaagaatctccagatggtcaccggacactacagggctccgctgagagcaagtagccttacttaagcaacaactagggaagcccaagatttaagttcaacagagactattttagtcagtttcactctatcctcgtcggtggccagtagtaagcttcatttaaatatatagctacaaatcataccattcttttcattttcttttttgatcctttaatacaacttctgtcttccccctcccccccgccaaccccgctagctaattgtagcaaactctgatgatgtgggctagtgatatggccatatttcatttctggcaaatggatgttatttacatttgaaaaagtgaaccatacttcactttcattatgaaacactgtcttcaaagcaacatccccaaagctcttttaatgagagaggagagggagtgagagactgtttcttcagcaggaaataactgtccccaaacttaccagtttggtatacttacagttttctgcctattttcttttctctctttctttctttcttctttctttccttccttccttcctttttttctttctttctttcttttctttcttttgagacaaactttcactgtgttgcccaggttagagtgcagtggtgcaatcttggctcactgcaacctcagcctcccaggttcaaatgattctcctgtctctgcctcccgagtagctgggattacaggcacacaccaccgtcccagctcacttttgtatttttagtagagaaggggtttcaccatgttggccaggctggtctcaaactcctgacctcaagtaatccacctgcctcggcctcccaaattgcgaggattacaggcatgacccaccgtgtccagccgtctgcatattttcttaaagcctgtaccggcctagatgattcatcaaagaagccgtgactctttgaacatgagtgggtcacccatttttactaagagaaggaaccaccctcaataactccatttcatctttgagaagtttggtctagagtcatccaaagaaaataaagcatacacttctatggatattatttggattaaattctttgaaaaccttcacacctttatgattccacttagaacatgctgccattatgagaaggttgacagctgcacacccctgtgcataggcaggattggagtcacacatcttactgtgctctccatactctggtactgttcacaggcatatttataagacctctaaagaactgcttcaggctttcagggaatgagaaattaattccgtgttcatcgttccaagagaagtatttctggggctgcaaaaccaataccacagaggatatgattgcctggtgttctggaacctgagagcaaacaaaagacaatatgccatttacacagctttgcagagcttattcaaacatgcattgggacatggacattttcattaagcttaccaacttttctttcctctctctttccttacctcttctctcttcctccttttttttcaactcatttggagaacacactaatatttgtaacaatgctattttcctggagtaagaaattcacaaccacatgaaacacacttgtaagaggttagagagaagccagctcttccgtgggaagctagttgcctgaaagtgctcaagattttttttttttttaatgattttattacttggcttgttagggcttattttcatagctgctaccaaactttataagaatattctttatccaggtcattaatttaccttgctgaaattgataatctaggaagccagaatccattgaaatcttgatcccaaatggatttatctcttcaggaagggatccaagtttcattttatttttagtgctttttaaggtattcttcacaggagggagagaacgatgtgagagtgttaatgaaaaaactaaataactttcctaacatgaacccatcatctgaaaagcagaacctaattttgaattattaaaggaggctggatcacaactcaccactgagaaatcgagggagggaaaatggtgtttgggaagtccaattatttctgaaccagagacagtcttattaagttgggcagaaaattaattaggctaattagaaaacctcattggaattcagcaaggagttatgagaagaagcatgacaacactggaagtgttgatagagggagaaggttctatgggagagaaatgagtttttccggaagcagatgcagggtgattcatgcatattgcggttgatcattgggtcacttcggatggaagcagcagcgtttttatagactttctgttcccagtggtgggtcttcactgagtattaaaaatgatgtctggtgtatgttgtaagggaaaaaagaaaaaaatccctgagatttattccaaggcttcagtgggattttatatttattttggtatttccgatatgctggttcatcagcatggcgcattgttaaaaagtgctgggtgggtggttttttatcttcacggatttatggagtccttaaaacatctgttccgttctgattcccccgctcagtacaaagacgttagtcaggggaagcatctcacactgcactgtttccacgcactgacgttggcagcggctaatagagataaccctgctgagacagtcagtgctgtgtgggggccggggaggggccggggttccatctccgggaagaatctcatgggatctgggccctgcaacacaagggcctttgaagtgagacgaggaggagcctcaggaagggtcgccggggtgactaaagaaacctgcggagggagctaaggaaacctgttccaggggacgttggagcgtaggaagaggactgtgcccacgatgctggagaatgatctccacgtccctcctaagcccctgtgacagtgacgtcttcctttctggggctctagggaaaggaggagccttcctagctcctgggagagaattatcagggctgctgttgtttttgagaaaatagctgcaacccagccaaaaccaccgggatggagggactcttaaataagatgtttctcatgtggggtgggcagggcaggggaagcggggaggacagaactcttgatgaaaactggtgccagactaaatcagagacgccgtgaaagtggcaagaggcagggaggagaatcgactttgcaggacctgttatgcgttacggctttttctgtgtgaacacatcctattcctcacagcagttcagtgtagtaggcttattagtcacattttacaggtgcggtaactgaaattcagagggctgaagtcatttaggatccacacctaacaagaagctgaaattaaaacccaagggttacagatggaatgttttatatccccctccccaaattcctatgttgaaggcctaacttttagcatctgaataatggtgtttggagatggggcctttgagaggtaattagggctaaatatagtgatgagggtgaggcctgcgtgattggaattagtgccctcataagaggagaaagccgggcacggtggctcacgcctgttatccctgcactttgggcggctgaggtgggcagatcacctgaggtcgggagttggagactatcctcctgaccaacatagagaaaccccatctctactaaaaacacaaaaaaattagccaggcgtggtggcgcatccctgtaatcccagctactcaggtggctggggcaggggaatcgcttgaacctggcaggcggaggttgtggtgagcagagatagcgccattgcactccagcctgggcaataagagcgaaactctgtctcaataaataaataaataaataaataaataaataaataaataaataaataaataataaatgcagaggaggaagagcgcgcatgctctctctgtctcctctctctgtctctctcttcactatgtgaggatacaatgggaaggcagctgtctgcaagccagggagagatccctgatcagagcccagccatgctggcatggcaccttgatcttggacttccagccttcagaactataagaaaatgaatttttgttgttgaagccaacctgtggttggctattgtgttttgctatagcagcccaggcggactaatacaccaggttcatttgttatcaaagccccagcactttcggcagcaccctagcgcctcaggagcgccctctttggtatctgaaggaaatggacactctttgcctaggttcccatgtggctcaatagaaaaatagtacaaagagcccttagaaaagttcctatggtcccaggattgtgggaattgtctctgcttatttggagaaggaccctattttcaccctcttctggggcaagataaaaaggatcacaggattaaagttgggatacccaggggtggagacaaaatgacgacagagggtttgagttctacatgttcttcatccccgtagcatagggacatggacagatgggcagtgtgggctgcatgcaggccaagggcaggttggcgctgaatactggaaaatgacgacccgagctggaggacctgaagccgggcagtctgctccagctccccaagtccagcaggtgtgacggccctgtcgcccttccccttccttggcgtgggcctctcctgaggccgtccttttccaatcaccaggtttgcctgtcaagttgagccaagtaacaagacaggagtcaatttgttctccccaatagactgctcctctgtctattcccagactcccaggtgaccccattatgataatgcccagcctgactgctcttagaacaggcctgatggagaactgagagcttccttgaaatgtgaatcacagagaggctggcagcccatggctctgtcccctgctggctctggacaggagccttctgcctccccattgtcaccgctgagcgatgccatgtgcttattcatgctgcctgctgctggcagcccgggaatgtcgcatcatgccatccattcaaacaacgggctcggttctgctgacacccagggagacaggcggattcagggtgtgaagtgtgttgccatcactttggcatcccaatctgaactcagtctttagagcaggggctggttttatggtcctcaggtaggggatggtgcccccacaccagatctccataaacacacctttacataaaacccaggcagcctgactgccaagctttggtataaaaaattagcaagtcagtcagtcaactggatatttgatttaacatcaaatattttagtctttccaaatatttggatatgttaatattatgataacccaaccaaagaaatgtggtgatgcaagattgagtgtctgaataattttcaaaacagtaatattctctaccctggcaagaactccaccccacgtgcacccactagtcattgaatcaatgcaggtcgttgaagagtagttatataacacttagccaagactaaagctaaattttgagataatttaaaacacagagattaaatgtatgccacacatgataagctgttcagtttaggggattatattatccaagtgatttatagccttacacaacttactttgtgtttcgggagtgataaaatccctatacatgtctgaatctagaatgggaagctgaagagctctgggtactacaaaccccagggatcctcattcccaggcccatgctgctctgcttcttatccacaggcccatctctctctcttttttttttttttttttttttttttggcattgcttaatgatttccttttcccctccattctgtacgctgctttatatagtgcatgtccctgtagttccaggataatttattatttaattatgtaaccattacataattcttcagctttagccttcaatgttttcattgttgttaatataactgctatcaagacatgtaagttttatttatcgtttccattgaggagcaataattatgtaactctgcaattctgcaacgattatttctatttgtttaattacataactataacaatattaaacctctaaaacatttggtgatagatttatggtgaagatgctaggagacagcaataataatgatgtatcagagtaataataaaactaaataatagcattaatattaatattaatggccataacagtaataagcggcaacattaccacttgctttttgttcacactgtatttggtctctttaatagatttcttcccaaatctctgtggttaattagctatataacatttggtactcagcagtgggtgcaacttcatttccagactttacctggcaaagctgtgctttatagaacaccagatggaaccggtctcttttgtccttttttatcaggcttggagagggcagatttccttcttcctcatgtcacctggggacttccatagacaggataccctgtgttgagagacacaggtgttgtagaatcccaagaacccgagatgtgtttggaaagcagctgtcgaactgttggatgagccgttatggtggagagagcatggggtttggattccaacagatctggactgaattttggctctgccactaactgggtgaccttgagcaaattacctaacctctgtggactacaattttctgatatcaaaaaaggggataattatataatacagtaatgtctgcattgcaagactattgtgagaattaaatacaatcatgtgtgcaattacatggggtataattgatgcctgttgacagctatgttttggagctaccagttgatgagattaatgggagaacatgactcgaagttgctccttcctataaatcaccttgtcctcaccctcccaggagctcccttctcacagatgccccagagacatcataacagttaaagagagctaacctctaacacaatgagtgatcactatgtgctggacaagtcacacacatcatctgattaaatcatcacagctatcctataagggagctgtgattatttcatccaggtgaggcttgagaaccaggaaccttagaagacatgccaaagttcttgccgctcactggtagtggaacccagccggcgcttctccagttacactgtgtactccctgcaggcgcacatcctgaaagccacttaaagaatgctctgtatgagagccgtcctcctgggacaaatccactccctgcttctcctggtgcccataccaatccattctccacagagcagccagcccgatcaccttaaaatgcaaagctgatgccattattgcccttcttcaaccctccaatggctttccgttgctctgaaagtaaaaccaacctcctaaatctaaatacctttatgatttgacttctgcatatcaaactcccctcctctcactcttcattacagaccagggcgccacaccttctgaggctacgccaggttcaacccccatctctctagggcctttgcactcagtttcctcttcctggaaatctttctatcttatcatgtagtatgtattttctatcttatccgcttatgtataatctcttctaggaaaattcccctcaaagcttcatgtaaatcaacccagccccatgtcctgtattcattagtacatgtcctacttatctcatgtataacatggaccatgtatacagccatcttccttattcttctgatcatttggctttatgtcttgtgtccttcaccaaaatataatcttcatgaggccaggcaccgggcccggcttcacagtcataccccatccacagctcagcacctgcagcaaagcagacactcaggaaacatttgctcatgtcaatctaaaaagaattaatctaagtagagcgtttacttgggccaagatcgaggactgcaaccccagagcatagaatcaagaagccctgagtatacactcccattagctgcagttacaagtggattcttaaaggaaaagaagaggcagtttctgagttgattaccaataatttacattaaaataacataaactattgactagctgtacattgttctttgtatcacaaattctagggacctgaatataatgggtgaggcagctggttaggaacaaaatgactaaacaattgccctgggcatggagggggctgactgaggtcccatactcttgtctttttagacctgcatacctcacacagctcagacggcagccagctgtttctctttcctcacttaagggaagaatgaccacttgctctcatgtgtccatatatgccctttgggtttaaatagttcctgtgtgatgggaagcaaagcaggttgcattttcacttgaggagttgatgaccagcatccaagtgacatagcacccatctccagaagcttaggtctgatgctgggtgttcggggatcaggggccaggagctgagagtgcagcaggactaggctgtagtcagcccaggtgcagagggcgatgcgacagaatggcagcaaaatcagatgcaccgaggagcgagggagagccagcttgtcacctcgccacacacgggaggtacgtcaaggctgtcattataaactggtatttgagcaggaactctggggctcattcataacactgacatttccaggggtcacacagcaggccccccccttctgctgagaatctttcatttgtacaattatcaaccgcagaactcagacagagcagcctccattattccacctgtccttgagttattattattttattgaagcattttccttccttgggttatatatatgtgtgattttaaaaatataaatgacattatttatagcaaggcgttctctctcctttccactgacgattttccttttcaatcagattctcttcattcttacacatcccatttgagtcactgccacgtgagtaacggggcccgtaaatattcagccacagcctcttgatccctttcttaatcccatttttctcctcacttcaccttcactaggatatttcccgtccttttttcccagtggctttgttaccacaaccatatcttttttgctttgtcttagcgcctattttttaatgtttaaattattcactaatataaccaagtaaatgtcagttaaatatttcagtcatctctctgtgtgtgtctgcttttgtacctagaactctggacaaggcagtaagtaagtctcatgtaaggatcaacagttcaggctccagattcccgatttactaaattctcaaagacaaattacttaaccaaatatggtttcttcaaatccaaaaagagttaaacaatcttacctcataggattgttgtaagaattaaacaagaatatccatgctttggccaggcacagtggctcatgcctggaaccccagcagcttgggaggctgaggcaggaggattgcatgaggccaggagtttgaaaccagtttaggcaacatagcaagatcctgtccctacaaaaagaaaaaaagaaaatctacatgctgtggactacatatttgtgtctcccccaaatttatattgaaaccctaacccaacccccagtgggaaagtcttaggagggggactctgggaggagattaagttttgatgaggtcaagagggagaagcacccatggcaggatttgtgagtcataagaaaagacagaggttagagcaatgtgaggacacaaaggaaagaaaagcctctgcaaaccaggaaatgagtcctcgccagacacagaatccaccggcactgtgacctcaactttccagcatccagaactgtgagaaacaaatttgggaaacaaattttcttcttttaagcccctcagcctttttgctgaaccagacccatttgcccgacacatggcaagccaatccctgagccttcgagatttgcagcagagaaaggctttattcatgagacatccaagcgaggagacaggagagcaagtctcaaatccacctcccgatgggtcatttgtaaggtagttttaggataggaccaatgggatggggagtgggtgatgagaggtcatgtgttgattggctgggatggaggaaattccggtgtccatggatcaggctatttgaggaattccttttttttttaagtttttaatttttttattttttggtccatgattagagtttcagccttctgacatcaaatgttcatccattgaacacttgcaaaaacttattttttttttttttttttgagacggagtcttgctcttgtcgcccaggctggagtgcaatggtgtgatctcgactacaacctccgcctcctgggttcaagcaattctcctgcctcagcctcccaagtagctgggattataggcatgcgccaccatgcccggctaattttgtatttttagtacagacggggtttctccatgttggtcaagctggtctcgaactcccaacctcaggtgatccacctgcctcggcctctcaaagtgctgggattacaggcgtgagccactgtgcttggctgtgaaaatgtaattcaggactagtttgagctgaattcggagctgagtcttgagttacggaaaaacagcttagccagcgtcctgtgatccatacatcagggtgaaatgctatctataggatcattgcggaaactgaggtgaggcagtgcagctgagtaagcaggacagctaacaatgggtaaacaaacagctaaagtcaataactgcctagagaaacttcagctactggctacctcatcattaatggctatctggccactggttttaagcccatggtatcttgttatagcaacatgaactaggtgtcacgtaaaatgcttcgcaatgtcttgatacatgggaactctattgttattattattcgttgctatagcaaaagtggaagcatttatgccaccaatagcaccagtagagagtaagccatgacttctaatccgtgggtccagagtccaggccagtgtagactggacaaataatatgccctagacatttttgtattacttttgaaaatgtgcagttgccattatgtttaatagtataaaatgatttaagtgctattgatattatcagataatagtaaaccttaataggggaggtatagggtcttcatgtctgtaaaagcaggtaaacattgacctgaattaccatcaagtatgaagaccaggcatagagcatgtgctgcaggcagttccctcccagggcaacaggctattaagcatccattggcttcttttctgatgcccctgcacttacctcacagagattatctcctaaggttttcctaggtttaacattttattcccacctcaaaatccattactttgttttcctccattctttcagttcttattttattctctaatgatttggttttctcatttttttttgaggctaaaatatctcctactgaagctactctttcaattagggagaaaagcactcaaagcctcttcaagcttctgcctctgaaactgctagcagggaaactccagtgcaaaaagatgagagtggatgcaaacagggaggaaagaaaaagaaactaaagaacaaagaaggaaaataagtgttcatgaggaactaattattctggtatttataaagaagttattgtttcgtttccttttttttctggaagatcaaaatatgtgtatctcattaatcacagacatttggataatgctgtcctgcatgagctccacacaatcctgcctgtggagcagatagcatgagctcgcttttacagacgaggcaaccgggagattcagagcattggtgagaagcacacaaggcggcacagccagtgacttggatcaaggcctttggtgtcaaatgctgtgctttttccacctctccttgagggaaggcttgaggagaaagaagcacttagcacacatctctgcctgcatattccaaaccaatggagaaacacaccaggaagccacatgaaggatgacaacatcagctttgccgctggtaatgaatagtatctattccaggcccttctttcattggcaggctgctcgccaccttttgcctgagccctggacctcacatgctcaggaagtcccccaggctgaccagtcaggcagatctctccttccctctgaagaagagccagtgagagggagaagagggccagtgtatgtttccaactcacattctttcactgacataggagggctgatcaacaggttcctcccaaaccatccatgttactgttttgtgtgctcatttgttttattaaatcctttatccagctaaccaggtagcaggattctagtcactcgatttgcctgtcccctgacagaggagaccagaagtccccgctgagcagcccagacctttgctttcttctccttttacaaaaaaggtggaaaactcagggtgttaatgtcaaagggaagacgaggagctgtagctctagacctagtgtaggcttagagagctggagtcatcagcacagttgactttgtctcttccttctatcagccacaaaagtactcacatttcaaatgacaaaacacaagtctcaggcttccaagagcagtcacttcagctatcctgcctgagttcttaggcaagtctgagaggaattaggtgtttcctttccaggcaccagggttatgaccacttcagagccttgccttcactgagttataaaatttttttaataagaaatgtctggtaaattaaatcaacagtctgttgatgaagatgatagctcccacgtgcagaaatccctaaattctgagcttcacgaaactgagctagatctgtttgaagtcttccattgtttttttctctctcccagttgggaacactggcacttcccgaatttgctttacagtttcaacgtcagcctcgttagcatcaccaccagcttcctcactctcatttgccactgtttcttgagtcaactggatcagaaacatcaatcattgaacagacaccctatgcgtctgtccctgttttcaaagtctgcagcttttggtgtggtgctgttgctctttctgctgctcttctgtgacccaaacagtggttttttgcagatcttcagattcaggatgatgtcgcctttcacatttaccgtagcactggtgactcacaagaaaagtcctctaagcatatgcctagaaaaacttgagatccacctctcagaatgagctgtaaaatgcaaacaccacaaccgtaaaacttataaaaaaaaagttcggccataaaaaaaatatagtctcctgatccatggcatcttggaaattctcaaactcctgcctccatctcaccataaagcttttatcaattatgttattcttgttcatgactgcagtaaaatgcagtttggtttttatgcaattctgtaagtgtactgctggatgggaaggtctcaggctttgtgctttgttctgtgtccattacacagatgataggtttggaaatgaagatgccagggttttagtcataattgtcacagaatatgtgacagaatattgtggctaataccacaatctattcaggtacaccattcaggatttaagggagcatgttctgggccttaatcatcttcatcatctgattaaacccagtagcagcttaaggttaccaggcctcctttgggcccaaatctgtattttagagtcagaaattttcagtattttcaagaacggtgaagctgtgattgaatcactaaaagtgattgtctcagatccagccatgccaagcaccagctgtgtacacactggatctcagtgttctcctcctcagaggtcttccttagctcctcctctctcctgtggaacacacttggagctctgtgaccaggagggagtacagtatagagcctgatccctgcatttctgagacagtcaggttgtttctctttgatttaaaatgatatcagaagaaatttaacagtctattggtagtagtgtgaaatagtacatgctttatgaagaagtctggatgaaacatgacaagctgaattggccccatcgtgagaagacgtcatccataattcccaggattttttccccttcctttttctatcttctgatgccattttcaaatctatttttcattattcctcccaacctaatcccaagtttcactgttgtttgtttatgttgcttttctactgccatttaacttaaaagttattgaatttctactatattttgagctcatgctagttgctgattatcaagctcctgatttgagtagacacagtctctgccctcagggagcttgtgatctgaagagactgtgtatgcatgcatattttctagccacaatagacatggggatataacacacgttcattgttatagagtataggaggccgaattctaagataaccctctagtccatccgcctacccctgtatacaccctgtataatctccccaacttgaatgtgggaggcaccaacaagcgtcatgagatatcacccctgtgactagattcctaatcaattgcctttaatcaaaaaggagattatcctgggtgggcctgacctaatcaggtcaaccctgttaaaggggaggtatcagagagaccttcttctgctggcctggaagcagcctatgggaaaggaccacatgtctagaactgaaggacaaccagcaagaaaacaggacttcagccttgcaggtgcaaggaaatagttctgccagcagccagagggagcttgaaagcagatacttccttacttccaagtctctagatgaagatgtggccagctcacaccttgactttagccttgtgagattctgaggagaccccccagcctgaacataaggactcctaatccatggaaactgcgagataacaaatttgtgttgctttaagatgttaaattggtgataatttgttttgcaacagtataaagttcacacatggaatttaaaccaaatgcaagaggatgagaaaggaggaaacaggtcattctatctgagaagtggtggaaatatgatagagaggaaggcattatctgaggtgagacttaactgatgagtagacattttttagacagacaaagagaagagacatttatggctgcgacatcatccacaatatgtttgtagaactgatgtactgacataaataaaggataggcattttaatctgtccctgatgttagaacaaaatatcatagactgagtatcttataaataaaagaaattcatttctcatagttctggaagctgggaagtccaaggtcaaggtgccagcaggtcagtgtctggtgaggacctggtctctgcttccaaggtggtgccttgttgctgtgtcctccggaggggccaaggctgtgtcctcacatggtgtaagggatggtggggcaaaaaagggccaagcacctttctgaaggctcttttggagccctcgtgaactaatcacatccccaaagccccactgcttaataccattattttggtgattatgtttcaatacatacagttgagagtgacacatatgttcaaaccatagcactagggtgcctatacttacatttctttttccttaagacaacagttttaaaattttatttatgaactttccgtgggtaaagaagtgaagtgagcctttcttagtttcccatatcattaatggcccccatatatgttgttgtccagcattttctgtagctccttttcagcattagtctcatattgatgcatttttaaatcagaaataaattatgaatgcacacagcaaaaagttgaatggatttctttgccatatcttttaacattttcttttcttcctgactgcttacattctggtatggctaatacgttgcttcaaactcataacctagccatctaaagtcacatactgtcttgtgaaatacaatgtctttatccaggagtggttagtaacctgactgtgttccaacttcattttgccctgcactttcacttagggtgactaagcagcgcatgatcttccatcgttttattgcatggtctgggtccttgtgcatcattctgtcagctacgactgctggactcactgtacaattcccacaagtgtgttaaagcccaaatccaatagtgttaaggacctccaattcctgacatcttccgtcgtctcatttttaaacaaaatagtcaatagccttggtgtcattgactttgccttcctctgttgttccaatgttgttccaaaattgctctgaaaccttccaccaagcttacagtacttaatcatcagcgaattcttcataaatgtcagtgggaaacccatcagctctaagagattttctttatctccatagcctttatgaggcttcttacccctcaggcactgatttttgccccttacaacctcaatttcttcttcttagtagcatctcaggcagaacagggatgggcttctccatttcttctttgctcctcatgtctgtcttccccttggggaagcccattcttatcattcacagtaatccttgacttttcacacaattaacatactttcttagggagctggaaaaatcactgtcaaaagtccctttgccataattctttttggtaaaatagtacacatttttgtattgttttctttctgaaatagtcttctccactgtgtatcattccacctaggtcaattgagcatctatttgtcagagatttattgatggcatgcggaatacatgaggagtgtaagattttttggctccaaatataatttttctccttgttttaggcaattgtgaggtcacaaaaaattgtagaaagagtttattctacaacttgccattaagggatgccctcagagcagttctctttgtggtttccaggaatgcattaagcttaaggtgaagataatctgcctcagcattcaatataagagtatcattaacactctgagtgctgctgtgggctcttcctagatgcatgtgcctttcagaacagactgggatttcagaactgctgagagaacctcaggctgctggagaaattctgtaatgtctcatgagaaacagagtgcacaagctcctttcccctttctcttcctctccgttccctgcagtggtttccctaggttcagcaaatgcacatctctctgggagttttgtttccatgggagttgaaaataagcactccaaaggtgaatgctcgcccagtttacagtcagtatgaccattgcttctattcaaatatccctagataataataattcagcacagggctcctccaggggaatgctgtgcttccagcaaatctgtaatttacaaaacagtcacctgagttttaaaaagataatttgaaaatattcagaaaaacgatgcctgtctcccacaaatgttagatttggagcattacaactcatctgtgcttggtgcctttatttagtttacttggtttagtttacttattagttcatttgttttagtttaataactaataataactacttattcacttggttttcgtttttgctgtgcatatcacttgcttaacaaggaaaaagattatgtgtctccttcctggaagtggacttctctgccaggcaaagatgagatgacattttgggtgatttttagacagcagaaatcaacatgactaaaaatttggtcattttagttgctcttatttaataaatccccaaagagaaaacattagttcctgcatgtccctcttccctctgttgacaccatttataggtagtcatttagggaacatctcttctggatactagttttgataatttcttccatccaaaaagagtagtccttaagcaattcttggtatatggtatatcctgtagctctgtctgacttaggaacagcatgaaaaaaattgtatatacttggtatatttattctaggagcttttaattcaagatgtacagtaatgtaagaaactcagtcaacatgatatctatggctaaatgaaggcttctctgccaaaacacaatggtaatgtgagattaatgtggagccggtgcaagttgggagagtagctatgcataataagtgactatttgggatagtgcatttattagggcagactaagtgctttgacaaagataacccacactgctcattgtgtttccagcatccacgggccaggaaactcaacagaagttctttcctggaacaactgtggggcctgctttatttctctgcatatatctctggcccctgtgtctctctctgtcaaggtgatgctgagaaccttgaggctatctggaataataatcctgtgtggaagctccactcttaattaggttcaaactacaaagctctgccactttgcttaactgagaaattttagtagacatttgtggctcaaaggcttttaaagtcttatttcacattgtcctccagaatctgtttccaacctgtgcgactccaaatttctgatactttaattctgtttctttttgtgtgcaaaccagctaattttatcttgaactcatctttcttgcaataccttgccaaacacagtgagggaagagcaacatatgctagcattctggctctttcctgctacttccctgagaagcacgggctcagtaggcacttggtctgccttccacgttaacaagggtgacagttttaccaaatgtttcactacagcagagcagcaatttccagcttgctaggcctgtttcctcagtgtctaccacaaaactgctaagctggtgtcagatattttagacatttttttttttttgtcagcatctacttcaaggctttgacttctgtattggttagggtaacgttagctgctgcaacaaacaaattccaacattgaatggcacaacaaaacaaatgtttatttttccctatacataaattccagtgcaagagttcctggagcaagaaaagatagatttccgccacatggtgtcacagggatccaggttccttctgtcctgtgactccactatgcactagagcctttgaatcctcagcatccagccagccaaagaaggaagagtaggaggcttttgtgtaccagccttgaaggtggtacatattacttctgctcgatcccattttgctagaacttagtaaaggctataccaatgtataagagacaggtgaagttgtctctgggcagctgcttctcatcaacaacagtgcatatactacaaaaggttgaatcatgaattttgggtggcagaaagttgcttctgccatacatagaaaaggtgttggaagaaattattgatttctattattgaaggaagtactcagtgtatttatatatattgcatataacatctccaccaatgcccactactgccttggtagagtgccctctctttgcaagcctgagctagacaccttggtttgggaagggttaatgttaaggagaaatactaggctcaataaagaaagcacatacattcacacgcatgcagatacccatacacatacatcttaaatgaagatctttattgtggacaatatgattccaattatattcatttttattatataagggatatttttaaagttgtgagatacataaaccacgtgtttctctcccaatttttatgagtacatcccccccaccccccaccccatgcaatcctagtgtgagtctacctggaagcatgcagtgccaggctcttctctaatgctaccattcttagcatgagtttgataactgctctccatggcatgctttctaattctgcgttcttgtttcagaaaaatggcataacaaagccccaaaccccaaaattttaccctcattttttcaaaaatgacttccaaaagtattgttagtaatacagcaagttccctctagtttccttgcaaattgacatactgagatattacagttgctatgaagtttctggtgactttaaaaacttttacattacattagtgtaatgacagggtttatctacagcttatgactgtgaatgcttcagcatacatttccataaatagaaacactgtagattttacattaatcataaagggaattgataattgcctatgggagtttttagctatgagcaaaaatgtttgacccaattatgcttgcatggtgagggacaaatatattgaattatgatgcatagatcattggtggatttcagggaaggaaagtaactatcccaagggaataatccagaagtgagcaagtgtttacaactcaaaaactgataagactgtcattacatcaactgtcacagctcagaagtttaaccccactcaatacataggatgaaaaggtaaacctgggctgttcaataatgttaagcacctgtcattcaaatcccaatatccagatgggtgtgttgagaagaaacatgcaacctctacatgtagctgaaacccgtggtgatagttggtgactggttttccaaaaggttaaactgaagctagtgccacaggcttccacatttgaatgatttgccaaaagataagcttccagtcttaattcaaaagccatcaactacattctttgaatgttgcttaagattctatttggtgttgataaagttgaatgagaaacttaaaagtgatttatcagatttaatttcaaagtaaagtcccttttcacatacttaaccattcaaagcctgaggattttttgcttgctattatgaattgaatggaagtcaactacaagagagaagaaagatcaatcactttagtagtcatcaggaattctgcttctaccacaaattacaagttcctcagattctattttcatttataaaatgaagaatttaaacataaaaactagctctagcatatagtgatggtaaaagtcatatgcagtacaggaactttagtctcattctatcttcctcttcaatattgactctctttcccattttctcaaaacttctgatgactagctcaattttccggttaactattgtagtagggagaactctaagatggcatccaagatcttcaccctcaaatgtacacaccagtgtactacttgatctttgagtgaaggccgaaactgtgaataggatgggatagtctatcatagctccctgggctaggttatgccacatggcaaatgccggtgggatagtcacccctgtgattacatcacattatataagttttcatcatagtaaactggggagcaataggaagtcagtgaggcaaaatccttctgtcctggaaggaagcaaacggcaccattgtggactgccgatgggggctacgtggccaacaaccacatcacagtaagcatctaggaactgggagtggccccagctgacagctcataagatcacaaggacctcagttccaacgccacagaaaatgaattctgcccacacaaatgagcctggaagaggattcgaaacctcaggtgagaatctcagccctggctgacaccttgatttcagcttgggcagatttagagcagagaactcaggaaattatgacccataacaactatgagataataaatgtgtgctgttttaaactgcctagtcggtgataattcattatgcagctgtagaaaactaatataactatatacaacatttccaatcaatattcaactcattcttgtatttcattgtatctttattccttcttgcaaaaaatattttttaagcaccagcaatatgatagatggtgtccttgccaccaatgatataacatagtctgtgccgtttatttttcgtagactagtagggaaaataattatataaacaaaatagattaagaaagtatcacatgtgctctaagagtagcttctacctgagatagccagggcacaaggaggaagtcagtcagtctaccagtggagcaggggagacacaagaaaagattctactataagctgcaactcagggcaagtgttgaaagacaagcagatgttctttaggtggagagggaatagaagagcaatctgaaaagaaaagctataggagtaatcacacagagatgtttttctaggaactgtaagtgggtaagaatggtgaaaaggatgggagtgcaggctagaggtgattgggattaggaagacataccttagagaagcactactccaagtgtcatccaagggggaacagcacgggtgtcaccagggaaagtgttggatgtacagaatctcagtcccacccactcccctatatcagaatctctgccttcaccacatccctggggcgttcacaggaactttcataggtttcagtgtcttgaggctagtgaatctggatgctgtctttcagagaaagggaagataatgaaatggtttaagttggataacaacatagccaaatccatcttttagaaatagcaggaataaggaggggaggtgaatttgtgaggcacgaaataggaagcagagaaaccagttagatcctgattctaatgtccagacaagagagccacgcagggacagcaggtgcagagaggagtgcataaggaagtcagatcttcatgaggcagatcatccagggtgtgaacgatagacgagacgacctcactgagggacaatggcttatttaagaagcatcttagctgtctgcttgagactatgggtcattctcaaatgtaggagttttattttggacatgtggagtttgagatgcctgtaggactgaggtaagatatttaggaagaagtgggtgtatgggtctgagatcactaggagaatctggttcattaattcaaataccaaggacttgcagggtttatcagaagacatgagagcgaatgagtgcttccaagctattaatttctattcaatgttgttttctaatatgcttgacacttctatactcaagatttccatggcacttgattttccctcttccaccttattaaaagaatatttatgaaaacacaaaaatatgtccaatgttaaaaagtttgaagtggactaagtacacgaagcagcctttagaatctaatgtgagagggtccttatggttcccaggtggaaggtgaggctgtgatggaggaaaatccacccacccattaaatttcatataccttctccttgatggttaaatacaaagaaagaactaataaccataaggaacttgtgaaaagatttgctggaatctgtgtcgtacttacaagatgaataccattacacctaaaatgtaacggaggaaacacaatttttaaaaaattatactacagaaaccagaagacaactttagaaagtatcttgtacataattttcataaaggcaaaaaaatcactaactatgaaaaagagataaaatagaaaatgatgtaactgcagactgattttaaaagagagctctattatatcaagaaatatttcaggaaaccataaatgcaagaaaggagtataagacagaaatagcactctaaaatttaatcagcaatgcagagaacacatttgagaatttttttcaaaattaaaagataaagaacaaagaagtaaaaaaaaattaatgtagaaagcataaaagttttgaactcaggagaatttaagttcataaaaacaaatcatactgaataggagtaatattcaaataataaataattgtttcctcagttgaataaacattttaatttacagatagaaaacattcaggaaacaccaggtgaaataaatgaaaaaaaaagaacatgataatatatgaactcaacttaaatatgctatatactaatttattattgttaaatgtgtgccaccatagcaaatactaagtaatatactgttgaattaattaatggaatatagcataaaataaacatcaaaaggccaatagtgaggtttccagaattttgcttctggcaatgagagattagtaccaaattcccttcagctgtaagcaactagaaactggcacaaaatatatgaatcattgcttttcagatattggatgacagtcaatgaagacagtgatccttgaggaaataaaacagatgaagtgaagcccatggaccactctgcactctgcctagatgcactctctggaagctcattatcttgctgagttaaatagaaatcagccttcagtgaggctgaggagactgcagaaggaggtataaaggactacaaaaattgacacagaggtcttctagactttattggtgaacacaaagaggcattagcacagggtgaacctgcacacagcatggtggaggactcctggaattcattaatggtttatttgagttctgaccagctagagtggagagattttattgagcaagtgggacattcagtgaagacaaaagaagggttataatacaggaaaacgtttattatttgaaaagatcaggaagattaataaatcccaaaagactgcttaataaaatacagaagaggtgacaattagtgaaacagagatgaaagaaaagctatcactatcacttctacagacattaaaaggataataaggttgtataataaaaactgtaggtcaacaaatgtcaaattagatgtaatgaaaaaattccccacaaaccaaaaattaccaaaatagtcacaagaataaatagaatacatatataatgtttccacaaaaaaaaacaactctaggtctgcatggcttcactggttaattatataaaatatttaaggaggaaataataacaaatctatagaaataatttcagaaaatagagaaaaaagaaacacttcttagtttattttatgaggccattattacacttatatcaaaatcaaagaaattacaaggaaaaaagctctattaatcaaaattatgcataaacatggacacaacagtccttgacaatgtattacacaattaaatccagaaatatataaataggatagtttatgacaagtatattttatcctaggaattcaaggttggtttaacatttaaaaagcaattgatataactgtatattaataaaatgaaggggacaaaaattaatagaagtggtaaagcatttgataaattcaacattcctttgtgatacaaactctcagcaaactaagtaaagaaagtaactttctcaacctgataattgtaatctacagaaaacctatagctattatcatacttcgtagaggacggaatgaatactttccctctaagaataagaacgagaaaagaatatctgctctcaccactgctatctgttattaagctggaggtcctagctattgcaataatgtaagaaaatgaataatatgtatacagattggaaagaaaagtgttaaattctctgaatttatgagtggcatgattgtgtacatagaaaattcaaagcaatctacagaaacacaaatattaataggtgaatttaacaagggtttatgattacaataccaatatatagaaatcaagtttatttctgtatattggcaaccaattggaaaatttaattaaaaatcctatttacagggtcatccaaaagcataaaatatttagaaatgaatttttaaagatatgtataagactgttcacttgaaactacaaaacattgctgaggaaatataaaggaaatctcaataaaaaagaagagacagtgcgccatatccatgggttggaagatgatagttttaaggtgtcagtgcttcccaaactatacatatgctcaacaaaattctaatcaaaatctcagcatatttttggggaggaattgacagtctgactcaaaatagccatacacatatgttccactgattttcagcaaagaggccatgatgattaagtggggaaaaagattctcttttcaatgtatggtgctcaaaaaactgaatatttatatggaagagaataaacatccattcttacctcatgtcatacacaaaaactcaactcaaaatgaaccacagttcatataagagcaataattatacaacttctagaaaaaaaatacgagaaaatatgtgttggccttgagtaggtaaatatttcttagaccgaaggcaaaaaggacaaactgaagaagaaaacttaagcagttaaacctcatccaaactgaaatcttttactctgtggatgtgtaaagaaaatgacaagataagacacaaaatggaagacaatattatcaatgcatttatttggcaaatgacttgtaaccataatctataaaacagtcataacaactcaatcctgagaagacaaattatccgttttttaaaataagtaaaatgtttaaacaaatacttcaccaaaggccaatgagaaagatcaataatcacatgaaaagaggctcaacatcaagcaagtcaaaaagaaaatgcaaactgaaaccacaatgaacgcctcttcccacattctaggataaataaaaacttaaaagactgaaaaagaaagtgttaaggaggatgtgggaacaagtcaaattctcatatattgctggtaggaatgtcaaaattgtacaaccattttggaaaataatttggtggtttcttctaaaaattaaccatacaataacatatgacctagtaatctctatgtatttatataagaaaacgttcatagcagtttcatttatgatagccaaaactaatactaattcaaatgctcatcagaaagtgaatagattaaaatttatattagattcatacagtgaaattctattgagtaatgagtaatgaaaagaaactttgatacacaaagcagaaggaataaattcaaaaaacattatgctgagccaaaaaaactagatctgaaaaagaacacatatgattgcaatcatgtaaagctctagaataggtgaaaccaaactgtagcaagagaaagcaaagccacatttcctggggtccgggcttgggggttaggggttgctgaaatacactggagagggacatgtgttgagaatgttcaacagtggtgattacagtggtggtgacacacacagacacatatacacacatatgtgtaattgtacactttcaaactgcacactttaagtggtcgcattttatcacgtgcaaaatacaccttaataaagttggttagagagttcacaatcgttctaaatctatctttttagctttttccatattttataaattctttctccaaatacctgtattaatattttcatcagtgataacctaataaaaatatttttatatatttttattgctcatgtcaaagaccccacgtaagcactctttgcaagcaacttaatcaactctacctgatataatagtaatgtataaaaactacagtctttaaaatcttccttactgtgtgtgtgcgtgtgtgtgtctgtgtgggtacacatattggtaggttttcttttactgatgacatactggactcatcattttaaaaagaaaagaaaacctgcaagacacaactagcctttgcatgtataattttccccatcagtcttgctgaagctgacccgtacagcttctggccttgtaacatatctgggtgtgggcagtggcaggtgggagcctggcaagccaaccacaggcagagtgaaaacacctgaaagcacctgagccatggtgaggccagcgtcggatcagaagcagaaatgaagacgatatgaattttaacgagttaaacatagtgcaaaatgagacagagataaaaatagatcagatagagtctcaaaagtgagattcaattcttctaaatgtccgagaaagctaattctacaattggacccttggcagctaaggctaacaaagaaattatgtagtattacttaattatccttttccactgaaagaaagagcatgctggttttctgaaagaaaatatgttcctggagaagaactcaagacagaatttactatgaggataatgaatctttggtaacgaggtaaatggtctcttcaagagaattttgaacaaggcagaaatcttgctcaaagacactgttcttgtacccaagactgcagaggtgagactaagatagagacctgatgaagatggctaatttgggacacaaggttacggtaattttttaatctgataacctaacaatacaatgcaagtaggactaggaggggacagaatgtgctttataaagactgatatgcctattaaacagtctgtcaaatatcagaaatattaggatagcctttggcgagtgccggggctcagacggtttacgattgaattttctaacaggtacctgtagtgcaggcgttctatgttgctgtgatggccatatgctttagataccagatggaaaggaaggtgtcattctgctggaaagttgaggagacagacagaaggctatctcacttcagagcaggtggagacagcagggtttctttcagggagagccagcattttcttcggggaagagatttctatcttctaaagtacttaagcatgtgtttgcttaagacctcaaagttctaaacaacctcggaaaaaaatggcattagcttgaaaatttttaagacaggtcttggagctgaccaccttatccatcaaaggaacttcagcattcattctgtggaatatctatctttagacagactacactttgatgtgttttgccaagatgactaagttacaagaggagctaaaaacgtcacctgtgcattggggttatatctgttttaccatgtttacgctcatgaatgccttacaaattctgtgtttgcagtttgggtaagagtaatgcagagatgctcaagttcacattcttcttgagaacaattactaaagtcaacagaggttggaggaaagcaattgcttaattcagctttatttaatgacccagatgattactgagcaccctccaagataaagaaagagtaaaatacagaagctgtagggaattttttttaaaatagtaaaacccagtgccagagagcttgacatatacagccatgattgtgtgattgatcttttagatttatcgtgctatttaaatatgaaaatagaactagaaaacatgttaaagtcaagctccaattgatagcatttaaattagaggttgtacctgcaggaggctattcccatcatcaacactggttagcagaagggtttagaagcacgtctgaagaggcattcttagactaggctctgttggctacaggctattcctgtccattgagctaaacactagtttaatgagcactgaaaataggcttaactttaattatcatgtgttttctttcatgtgaggaaattttataagtggaattatataaactctggcttcctataaacatccatgcatatgctattttgtgagcattagtattactaaatcttcacttgctattgtgtttgataactaagaccaaatgtttgaaaattaactacaaaaactaaactcattaaggtaaacagattactctttaaagttcccaagttaaaatagttctcaacccattctaactttcagtaaccttttgattctgttacagttttacttagagtccctctacccttgggataaaacaacagtttattatgatataatattttatagttaattgttcaattctattactaatatttaaatgatatatttgtgcctatacacaaaaatgaaaatacttcacagtatttttattagattttaatattaacataatacaagattattattattattattattattattttatttttattttttttgagacagagtctctctctggcgccaggctggagtgcagtggcatgagctcggctctctgcagcctcctcctcctcctcctgggttcaagcgattctcctgcctcagcctttggagtagctggggctacaggcacgcagcaccatgcccagctaatttttgtatttttagtacagacggggtttcaccatgttggccaggatggtctggatctcttgacctcgtgatccacccaccttggcctcccaaagtgctgggattgggtgtgagccacggcgctcggccaatactggatttttaaaccaaatttggaagttttattgttttctatgccatgggatagtttaaatattataggaatttaaaggttagttgaacctcagctgtgaacccttctggtcctcgtgcctactaaaaatgacaggtgcttaagttgatctgttcagcgtttctactttctagatgaattttggtagttagcattttgctaggatagcatccatttttttctatgttgttattgagtttcacatagtattcctataaaacacttcaatctgtctggactcagtgttttgttgtgattgtttcttttctcttttcttagtcctaattgtgtctataattgttttctctgttttcttcttcatcagactcacaaaggacttttcaatgaattggcatttgaatttcctcccctgctctttttaatttgttcctttgtttgtttttaattcttgatcatatccatgttaagtccgtcattttaggtctgtttaattattttgttgttctttctgtaatttcttaagatgagttactatattcttcaatttatctatcttcttactgttagttttttatgaactatgccaacttaaaaaaatttattactctttcccattataattatttttgtcagatccttcctgccttatggatcatttcattttatataattgcctatatattatatagtatatggagatttatacctaatacatcttaatctttatccatttggtggctctcttttgtatttttatttgtaattttaaaaatttattttaattttttgactgagtcattggtagatattcttttgtatttttagaccttccattctacgttattaacagttatagtcttccgtgctgacacaatcagacgtgttttctctctattgtttgaaaacaatataaaatataacttcctcaccaagactgactttcacccatcaaaatgcccgatttcctttcctatcctccctcattagatgtaatatttgggaaatgtttcttcctcctccccacttacctcacagcaaatctttggtattttttagggtgcttctcccactttcttttcttccaacttaaagttctagttataatgtagtgttctaggcagcatttagacttttttggggtccatgctctccttttcaagggtgggtttgaacacattctcgggcaatctctccgtggccacctgggaaggaagataggcgcttacttctcaccctcgtttcttcttcctcacccctccctccctgcggtctctgttctggctcattacccgtttgctgagctgttcttgagtgtttccttccagggggccggggtctctgcgtggagcactctctgaatgagtgtcgactctcgaaatctttcttctgctctgacaagtgaatgacatcttgaccgaatacaggagtctagtattgcagtccttttctctcagtcatcgctggatgttatgtttcttctagcttcctgtgttgccgatgattctatttctttttcctttgtaagtgactggttccctctacacaagagttcctaaagttatatagttatatagaaatcggaaatttcattgcagttaagagtattttaaaaagacacatgcccagtgaaatagagatgctgaagatgacaaagtgaatttaaaaataataataataataataaagaagaagatttaaggggagctcagaagtattgctgcagttaaaagaaaaaaagaagaaggaagaagaagaagaagaagaagaagaagaagaagaagaagaagaagaagaagaagaagaagaggaaagaagaagaagaagaagaagaagaagaagaagaagaagaagaagaagaagaaaagaagaagaagaagaagaagaagaagaagaagaagaagaagaagaagaagaagaagaagaagaagaagaagaagaagaagaagaagaaaagaagaagaagaagaagaagaagaagaagaaagcatgggccgggggcggtggctctcgcctgtaatcccagcactttgggaggtggaggcaggcggatcacgaggtcaggagatcaagaccatcctggctaacacggtgaaaccccgtctctactaaaaatacaaaaaattagccgggtgtggtggcgggagcctgtagtcccagctacacgggaggctgaggcaggagaatggcgtgaacccgggaggcggagcttgcagtgagccgagatcgcgccactgcactccagcctgggcgacagagcgagactccgtctcaaaaaaaaaaaaaaaaaaaaaaaaaagcatgcttctcaatgaagaaaacaacacattttgtagttaaatgaaaacagaaagtgtcactgttgagactcaaattagtggcctacaataaaaagtgtaaattatatttcaaagtacagattaaaaggataagaagatggcaattatgaatatggacatagaagtttaatatgcaaataaaaattatttcatatggagaaaaagattgataagatcaaggtaaaatccgagcaaatcatagaaaattatttgggcaagctgaagagagacctgagcctcagtgggtttgctctattccaggatagactgatgagaaaaacacatgccattttgcacgtgttttattgcaccatcatattgcaatgacatttctgaatcttgataatctattatttttcttcaatacattgggattcaggtaatgttgtgaaattactacataggtgaggggagataaagtggtctcttactctgggtggtataaaaatagtaaagtctcccctactgacacacatttccttttaccctcatggcctcagaggcaagaaggatgcatcccatgtattcagccccttctaggcttcctggtcatttgagagagtcaggccattcaaagtaggcaaatgttgcaatgtcaaccttcacctggggtcctcacagactgttgtggtataggcttgccttaagattccccactttctggtcctggacaaaaataccctgtggctaatatctagtcctcttacagctcacaagacagtaagtcctgtgggaattctctccatagcaatttcagcagttactagcatcagaattgccctttggtcccagatgtgtgagtcaagaggcacagattaaagttgcaagtaaggagaaaagagaaacattcagatctgcactgcaaagtttgttttaatcattcggaaatatctttggagcaatctctatcacactcagaatacaaatagcagcaataactactactaattaatattgatgctttaaggtttacaaaacacatttgatctttgaagtcaccctgtgttatgggtgttattgtgagaaaataagttcaaagtggtttagtgcggtgcctatgtgtacaagttggcaaaaaacaacaacaaaactaaggctttgtctctccaagtccaatgatttttgcataatcattttaacaagcaagaggaggtcaaagctagtttcagcctactgactttaatctaagtgtataataaagtagtaaggtgtatgataaagcaaacaactcccaacatcaagatgaataaggtacttgcagatattctggcaaaggaggagttattttctttaatccaatgcagtgttatctttctaaagccaaggacagtatcatttttgcttgcttgtttttgtctgtgtttatccttttattaaatgtaatgagtgagtgtaagtaatacatacatcaatatatgcatacagagaaatccacatatcacggatgtacaacttataaattttcctaactgaatacaactatgtaactaccacccaggtcaagcaacataacatcactcacatctgagaaggcccctcaggctccttcacaatctttgcctcccctgacaaagacagctatgaccctgacttccaacagtttagaagacttttgcaaggacagtcttacttgccattctacacacatcatgtaacacagaatatctgctgtgtttgataagtatctgtcggatgtgtgaatgaatgaatgcatcagtgaataactgagtgagtcagtgattaaatgaagagacccttagaagacgaagtgttaccaaatatggctttggagggagagtttgaagtgaggttctgagcttagctggttgtttaatttgaggcaagttgtttaacctcattgagactcaggttacttatctataaatagaaacagcagtgtctatcccataggactgtttgtcataagcctaaggttaatgtatatagaaccagtgcctggcacctgtaggctataactgatacgtaataattgttattacaagagagggatccagctatctgcatttggggcatgaataacctccttaccctgatcttttctgttttaaataactttcaaatcctttcagaaatgatacaattttaatacagtggaaaatgtgtaaccatacccagcatatcctagcaaaaataaaaacagtcatgtacctcataaatatatacctactatctacccataaaaaataaaaattaaaaaaacacacaaaaataaacaacaaatgcaaaagaaacaaacagaaaatatttggtgggtaatgcaactggttcgtgtcctggagtaagtttgggtggagatctggttttctgttcctttgcctgcagtgcctgctggtgatagtatgttctcagatttctgacactccaggtttgaattattcctggtggtggtgactcaccagccaagccgggttggatttaagctgggatagatcaatcaaattcccactctacaccttgggtgttcgagtcccacaataatcaaacctcatgtgatctctaccactacagcccatattcttcatctctatttaatgccatcaccacctcttcataaaactccacctttctggccaccacccccaacctcattgcttcctccctctgtggcttagacggtgatgctgagatgtccataacaaatgggcacggtgccttcacactgctctttctgaaacgccacgtgcagccccttgatctttgaattggtattgctttcatctggctttccagttaagaagagtggcaattcgtttcatatgtaagaagaaagactgggctttaaaaaggtttgttttctgtagatctagtcaaatatttctttagaatataaatacttatggaagaagtcatattcacattagttaagttgcttaatttctcttactaaccggttatctctactgtaaaatggagacagtctggattggattctccagagagcagttagggaaatgcacatatggaaggtgagtggacagagtcccattaaagtgaaggccctggaaccgctccttagcgagaatcgccaacgtacttagaagggctttttagtatttccatgatcgatctacataaaaaataaaactgcaacacacgaaggactacccatgaatgtggaccaagaggtttgtagggagtctgctatgttggaagagtaattttcctattagtaataatggtaatgctactattatttggttgctatcgtttttttcattgttactattaatgataataaggacattaatttgttcagtgtctgttgaactttgtgaggtgaaagaccatctctgtctttttgtaccctatcctcagcacttaatatttagcaccagctaggttctcaggtgactcaatgactgaataaatgagagacagatacactgtgcccaatactttactgtgttatgttctttaacttgaagcaactctagcaaatagcaagcattatctccatcttacagatttttaaaactgagtagcagagatgttaaacaatttctcaaagccatagcacctatgtgtttccatcccggtcagtctgattccaagaaagtctaaacagcacttaccactgctctgtaatagttcaggtttacaaggtggaagcctcctttagaccactggaaacccctatattatcctgtcacgcttcccacctcccaccctattattttcaaaaatggggatcggcatgctagttagaggtcctggcagaagtttctggaaggcgaggttgaaaatgttgaggcctgtgcatggatctgagcatcagcatacgggctgagggccagctctaccttccagctgctgtgctgggctctgcttcaggtcatttctataccaaagaaaggtagattggaaggttctgaccatggaaccacaagaacgactagagtgctggagggattgactggtgagataagattaaaagacctcaatatttatcatttttctaagccgagactgtgggacagatgggataaccatcgacaaatatttgctaggtgtaatcacttcagactactgaactcatggacggttctccaggcagggacatgctgcttgtcagaagggaatgaagggggcttggagggtgtggagtgccacggtgcgtgctgatcctccttgacaccacctctgtgtgcagggcctgtctcgcacctctggcttgggagggtagatcatctctgcacctcccctgtgagcagtcacactgctgttttgagtacaagccaatcaccaggataaacgttttgtaatggcccaacttaaggcaatggaagaaagggacaaatccttcaacgcagtgatcctcatgtaattgatctgcaatagccattagcctaaaactcaccttccatctacatgctccgtagtttctgtgtaagcgaatgctgtcacatgaggcgtttgcctttcctccccacccgccgtttactactttgttccttgggagtcagcctaagaaagaaagaattttactccttgctgctttttacctattcattcactgagttctacaagtgcttgaataagaaatggcaatagaccgacacaaaataagtgctggatgagtgttgaatgaatgaatgaatgaatgagtagtgcatatacgggcaaaactgcaccttttagaagtcatttttaagacacagtgtcctagaatgcatctaaaagcagagatagcttgtgtaggacttagaacaatggtgagctccacacaccatgtgaaaagcattcatgtactttggaagcccctacctagattatgctacattaaagaaaaagcccaggcagaaagctgccataggtaacggcctccacagagaatatatgatggccacccttgtcactgcagggagtgttgggtaaccaaggctttggagttaggggaacctgaacccgcatgtcagtgcctctcctcactggaggggcagccttgggcaggctacagaagtactcagccgtgctccttcctggaccctgtagccaaagggggggaaaaaaacagcactagtgatgtggtctttatttaaactgttcacatcttgtttattctttactttttcattaaaagtattgtattaaagtatgcatctcaatcgctgagttttttgtcacccacttaaatttcactccagtggtgaaggcttactcacggcagcctaatcccagctctctcgtatctcttcttcttcatttgaaaaataggataatcatttcttccttatagggttgttgttaggatttaatgagagaatgcagtgcccaggcgctcctaatatatgcttaataagtgggagatgttattgttatgagctatttacttagcatcacttaaaaagggaatagtgatattttaggactgtccttaaatacactattggtataaagtcaaatgcttgatatgcagcttgtggaaatgatacctggttgcctccaagctgccctttattgctcttgtttattcgtctgtctcatagccagacactgctctgtcaggatacagcatgatgtttgcataacgggagtccccgcgagaaccctggtcccacagagtcatgggagacccttgtaggagcttgattcccatgtaggccagtacagtgccagtgcccataagttcagggcgaacagcagatatttacggcattttctttctgtgctgggcattgcctgaggtggtgacagtgtagtggttcaggtcatgatactgccttgtgggagcagttgactggggttggggggtggtgggagcacagaactctcagagtgatggaatgcctgcaccatggcaagaatgcacagggtgctcctgaaccatagagaccgcctgccttgtctagtgtggagggatcactttattggagtaagcgatgcctgagctgcagcatggaagtggttaggatattccagatgggaggaagggaaaaaggtgtttcagattgaagaagttgtgtgcaggggcaatcagctgccagccagcatgtgcatcgaggtgtaatgatcagtgccaaacaggaaagcgtaactcacactagttattttcccgggggaaatctagggaactggccacaggaagttgaaggactggaagggcaaaatgaaatatcgaagccctcctgcagctggggaaacaaaggaaaaggttaaggtggtcagaaactagaacctgtacctgtggaagaggccatgcacaggtgcggcccagccctctcaggagtagaggctgctgcctgcctggctgtgctggtgtctcaggagcacgcaggaggcaggagggtcacgcggagctgggagttgggcctctgcagaggggcattgctgctgctgctggttcctatgacggtgaatagtaggtgttgaaggaagatggaagcagaactcacttcccctggaactagtggctgctgccagtatgaagggcctttgcagggaaaatgccacaggaaccgcaggccaacacaaaggggcaagtgcctgtccccttttctgccttccacccttcttagtgaccccttctgaggagccaacaggaaaccagttgacaaagaagaaatggagtgtgtagagtcccagcctcaacatcacaaggcagcatagagagggtgcatctggagctgagagacacaggagcttatcaagaacgtgggatggcctcgacatcagcgcatgcgtaaggtgagaggctggagctggcacagggtagggccctggggaggatagcacagtaacagcagttctctgtcatgcaccaatgacggcaatgcctgatctatcaggaggatgcctccctgtcttccttcctcctagagagagtggcattaacaagtcagtgtaggagttgcatttattacacttacaaatagtcaaaagtgatcctgagcaattcattgaaaatatttagctaatgatgaaatagaaatatctttcttccttttgttttctcttagtaaagcacttaattgtttaaagactaaaggaaatattaatacttagaaggctctaataatgtaattctaatttaatgctttttagcacaaaaaagattttgactaatgtgtttagtaagtaatggttttcctgagtaatctttacagcaagtaaatgacttgagatcatttattagaaactagtgaggtatgtttttcgttgttttttccttgtggttttcaagggtgagtaaaaggacatcaataaaacagtgaaaggcagattgacaactatctctgctccacatctccatccacacattgttatagaacatttgctctaggtgggactctgtaagggggggcaggatgcagcaagccgtaaaaagtgacctggctcctgccctctaggaactgataatggaaatgaagacactgggtggacaaagagcatttgagtatgactatggcaacacatttgtttattccggatagaatcgaaggaaatatgagacaaatgggacctgtgcaaagatatgccttttcctctagttgatgacccactctgggagttgttacttacttttatgttcttttgctgatgaaggcaagaatccctcaaatattgaaaagtaatcacacaaagtatggtaatggtaatgtgtataaatcaataatgcagtttagaacaattaccaacgtaactcccaggtgtcttttctcacagatggatttttatatttgctagaaaataacaattactttagtatgtatcactaattaaaaactgttgaataattttcaacagatattaagtaattattggcaattccatgtcagcaccagtaaataataatctcaccttgtatcatataattaaaactacaatggccccctccacaaattttaagcagtcataaataattccaattgtgcacaagtagcagccacgcattcaactcggttttgtttgtaatttaaaatgacatttttcatttgatggctgatttatgaaattaaaaaaaaatgaatttacctttcataatggtctaatgccctttggggatataacagatgttcgactgcccaaggttggcagctgggcagaaaaaaaattagccaagcatgttgatacaagacctaaacaagaaaagggtagtaataatgggtgtcagggtaaaataaattaactgaaggtttgccgtagcgtggtcctcatgatctccatcttgttgtgtgtgggtgcatgggctgccgtctgcaggctcccctgggcatctgtctgctcctcttcccagtcgccattgttatcatggacgtagccgagaactggcacagtgctgcagttgttttttcttctcctgcaagggaacaacatctaggaaagagggaagatggagactcctccaaatgccttatgcatctgtcctcccgtggcctcgcttcccccagaaggacatggtagcagaggtggcaaggatggggagtctaaagcctgactacaaagcagattcagttgttccacctatctatctaacaaatatttactgggcatttactatgtgccatgtactatggttggtgctgattttaaggtttcctgacttttaaaaggagacgcaataaactttctttattccttcacctcaaacaatttaagacctattgatttgtatccataaaacagtatgtggccattgtccatttctactaaggtgtgaatatcagctattatatagacagaacatctgcaactctattgattcagagatatcgttctgggtcatttaagatgtctgcaacctccttccctgtagatggataataaccctctgtactggcacctgccttgggttatttaggtgctttcaggaagcagatggtaacgcccagtgaacttctaactgcttgttcagtgatatctcccctattcgatcgctatggtccatgacaggagagtccatgtccgtattaattaacaatgcatttccagcaattagctcagtgtaaatatttgttcaattaattattgattgaaattccaaaacagaaaaaagggcagacagaaaatttgccagcaactcttttagtaaagcactttcttgtttaattgttaacttttttgtttagtaaacgacttcattgtttataactaatatctctcactttttataatcaagagtatacatcttgaaagataaatatggccatacatactatatcccaccctaccccactctaattaggctcatcctatatgatccatccttagagtgtgtacttgaaactatcgcatactaatgcacagagtcaacctggagtggaatcctctgcacagaattcttggatgtctagctcctgggacacatcaggaaatgctcttttttgagctaatgggcatcttcactcattgaatcaagaaggcatattgcaggtgtacaaacaaatcaaaaaggattttatttatttattctatatcctcaggtaatgtggggccatacgtagggtaggattcatgaagaggtctgggttggaaaagaggggaggcaattcaaggcccctgaagatcacagggaaactagaagggctttgggtttggagccagccaaatacatcccggctcagtggagagtttgtttccatctgtccaccagaattgaggaggcaggttctggagctttaaatccagtgatagctgatccaagcagtaatgtcaagtagactgtcttccccaggaggggtgggcacaggagaggacctataagaagggagcaacatgagaaatagaagatcagtatgtctgacttggtgtgccctcagctagaatcctagtggcctgcagttaactatggcagcagcccagtgtgatggaaggcatctgggtttgggtgtcaggatgattttagtttgtatcctagtccacctctccccatatataagaacttacctattttttctaactttgatgaaactccttgcctttatttgaaaatggggaaacagtagccatccctaaaattattggaggatgtgatgagatgatggacataaagcacctggtgtggttctcagcacactctagatcctcagtcaatcttagatccccacacatagtgccaagccagcggaatgggtgatgctgaaggaattgaagctctctctaaagtacacgtacttacaaagcaaacagattttcaaacatgaagggtctatgacttttggaatccgagaacaggatttaaagaagtaattgcaatccccattgtctcatctggtagaatttacctaaacaagtggagtttcccattttactgaaaacaaaccaagcaggctaaacggttttacttccattttgcccatcattctgtgtttgtgacaggagactgctttagagctgtgagcttcaccttctatcccttcctggccccaaggctctccatgggaattgtgaaacacagaaccacaggtgtctccaaaggaagcaacatatcttttcttctccctgcaaaagattcatataggctaaagaaattgcatgaatacatatcgctttgtttaaataacacttggttttgctgcttttaatcattggttcccctgagcctggcatgctttctgcagcacacactggctgcatacctaacagatattttgaatacaacagcttgactcccctgctgcttggatgatagcaattgcctaggtgttccatcctcttccttctcccccgctctatggttgcaaggagatttcaagtgcaatttggccttgcacatcaaacagcaattttcctgcagacatcacaacctccaaaaactctaccctaatcaaatctatcaagcccaatttaggggtgagcttgtgtctgtttatcaaggaaatggagttgaaattgtcccctttaatggaatcacagctgcccaccataatctttcacatggatgtttgaattaatagtaggacgtggcccgtgctctccaaccttggaatttgattccggttataggaaattgctataatttctgttgggactctcagagatgttggggcatttggggctggggttagaattaatatgtcagaggaatttaagaattcagaagtggttgggggaagattagcacttttacacaacacccaatgagtcacctctgcatcaaatcaaacctgctgtgacccacgtgaactacttttaccaagtcaaggagaaagagcagaggaatgtttttttctgaagttcaaattttaaatgagaacacagcagatatgggtagaatgctatttgtccttctgaagtgtagggcagctcacttgaatcaattgtgtgttgggagttgccatactgggtggccagcagcccagctgagatgtccaggtcatccctgagcgagggagaaggccagtagccagtcctggggcccactcattcactcccattgttaccttgggacattgtatttctcctgaggaagcctcagtatccccttagaggttgtgttccgctcagcttggagacagagcctgtggcagtttcgccatagcacagggtcatttcaccttttaaaatgcccttaccaaaggacattcacttcctctttcaagcaccttagcaccttttgtttatatcttgctatgtagacccctttttttcttgcacatttttgtgtttgtatcccgtgtcatcctcatgctacagaagggaggtaaaccattcctgatgcagtattgtaaatgaggaaagcccagctagatgaccttttcaattaatggtggcacgggaaccaggccgccttgcacaaacccgtgctcttcccgtaacacgttctgacgtcctgtcctgaacctttctctcaatctccttgatcagaatgtgagctgggcccatctttcctgaggcagcatccatgaccccagccctgtgccacccacacagacctggttacctctgacctctcaaggaattttctcctcatattaccctcccctcaagaattcattctgatagagggtatttcagggagacatgccttgtataatttttttaggtgcagtataataaaaaaaattaaaatcctaaaaaaactaattctgagcattacaatgcataggtaagagagagtctctttccctgaaatacacctgaagttttccatctttcaactgacaataaaagactcctaaattagagaatcatagacatttaatacatgtggggagagaacctattcattttcttcaagagtggctaatgcctctcagaaaattctcccatttagaattaattcagcttttctcttggattcctttcttgtttcctttcctcctgcattgtcgtgcctcttttcattttacttagggccatttgcatgaaaacagcatttcagctacttggggttttatctgctgccatttactctccctcagaattcataattccctgctatcgcctccaactctgcacccaccacgcttgggctgccttcaggtaggagggcacatgccacccatccccatgagcagcaccctctgtgggagcctggaggcctggctgtccccagagtagccttgctggacagaaggattgcctggtaagtgatgcgtgggggttagggccgtgagggtgtgtggccaagctctctccctgtgccatcagcagctctgcccttgtctgttatcaatggtcggtatgtgtggggagtgcagaaagctgtggctcctttctcgtgcaaacagagtgctgcgctaaccttcctcactgcactccgtatggctaacaaatagtcagagcctgagaaactgtgaaaagaaagcgagaaacaaaaactcagtgttattttcccccactttatacaattgcctcagattattgattgagctttatccattatgctgtgcaacagcctttgctgctgttgagaattgtgaaagggtgtctgttactcaggagagagcctgatgggttgtggatgtgtttgtgagcagacagatgcagcccagctccagattgtcgagtactgaaaggactataggcatcagccaataattctagcatgtcatgtacctggcaccctccatttccagacacttcacagagctgtgaggtagcaaatacaggacatttgaatgagattttccccctatggcaggaggtcatcctcattcaatttgtgggatgttttattcctttcactgacaaacttaattgagaggggacattatacacagagtttcctggcatcttcacgcttcttcatcttttgccacctgtttccttcccagaaaactcctctcttgaagtttgtcactaacgtattttgggagtgggtttttttttttctttctttttcagagtctcactctgtcgccaggctggagtgctggagtacagtggtgcaatcttggctcaccgcaagctctgcctcctgggttcaagcaattctcctgcctcagcctcccaagtagctgggactacaggtgtgcaccaccacacccagctaatttttatatttttaagtagagatagggtttccctatgttggcgaggctagtctcaaactcctgacctcaagcaatccgcccacgttggcctcccaaagtgctgggattacaggtgtaagccactgcgcccggccatcactgacttattaattatcaaataaactggctgaatctcaagccaacctacttgtttctgcagcacttgctcccagccaccagctgctcctctctgtgaaatctgctttcctggccctccagattttgaccttcctgcctcccccgaacctggctgcctggcctctgccccttgtgggctcctccgccttgtctgcctcctgagtgaaagcattctctagagttctgtccccaacctttctcttgtcctttcttttctttttatacattcttttccttggtgttctcttcacctcccactgtccaattatcacctctgtgggaatgatgcctaaatctgtttccagccttgactatttatccaaaaatctcatcttgcatctataattgccttcacagtattaccagctctgtcttccttgccccgacataaaatctgtctctcaggcctgctgatctgttgattttaactttgctatttcgtaccactccttttcatctccaccacctgcatcctagtttggtatttattgcttctcactcaaactagcagaacaaacaattagttaatcactctcccttccatctcttgccctacacacctctgctagattaatcttcccaaagtacaactctgaccctcacactttctaataaaaagccgttaatgatacccttatttttgccaggtaagttaagtccagcttatttattgaggcaggggtgagggggttggggtacggccacactcataagtgtgacgtctgctgtttcctgtgcctactctggtctatctcaagccctcaccttcttaatcttcacgcgcacccagctttcatgccataaagggcaagagtagtttcctgaacatccacactcagtgagacctctggatttgatcctgccatcccctctgcctggatcagcgttccttttcccatcccatccacctcaccacctccttgcttacccgacacagtctttatcatctttcaaaactcacagcaagggttatagcctctgcaacatcttctctcagccaacctgacagcatcagccattcccttccttgtacccccaggccgcatactatgtctctattgctgtggtttgcatgtgtttcctgcaaaattcatgtgtcgaagcttaatccccactgtgctggtgtcaggaaaggggaccttttgggaagtgattaagtcatgaaagctctaccctcatgagtaggttagtgccttgtcaaagggctggagggaagtagtcgtgactctttttcgccccttctgaccttcctgccatggaaagacacagcgttccttccttctggatgatacagccacaggtgctctcttggaagggatgacatcaggcattaaacctgctggcaactggatgttgcaccccagcctccagaactgtgagaaataaatgtctgatttttataaattaatcactctcaggcattttgttaaataagtacaaatagatgaaacattcacgttataatatatgctcctataaagtagaggccatcctcaccatcttcatcactgtagccccagcacctagcatggaataagcatgaaatcaggaccagcctcaccttccaacctgacagaaattcttttctttacatgagcatgtactatgcttccttctgtctttgcttttgctctggtacttccttcccacagaaatttcctctctattatggattcaccagaattctacccatcctaaacaaagctcagcgtacatatcttttcccacaagaagccttgtttgatctgttttcattcatcctacatgcatgtgtgatgtgtgtgtgtaagtgtgtgaactcccaaacatgaaaatcgtatgatttactgttatccgattatattagaatttggattcagattttaaagctttattccttaatttaaaaaaagtttgccctactctaataataaaactcatcttgcaggggcaataacactaatttctaataatagatcttatgatagcatctggaatacagtaaatgatcaataatgttaattcatgttctttcttctttaagagacttaacattttatgacttcagcatattcatacacttctttattgtcaataatagaacaaaactcccggtggaagaacaatatcttattcacatttctcttgccagcagtgaatatcagagattcttatatacttgtattgcttgggatatttattaaatttaacggagcaaacagatttagaaagctttatgctttaaaaaagaatatagttttcttatttgcacaaaattaaacatgatgtttatggtcatgcctataaaatgttggacttcacgcttttgataaggaatataaccacatgataacatattttctatgggaaaatcagatttgacatccattgtttcaatttagtgttgttagcagaaattttgtttcttttctctgttgtatctttatataagcatgaaaacatgaaacagcattgacttgacaacatttttttaaaaggtggccaatgaggtaaattagattacctgctaaattccatgcagtaattgagtttttctgtaagtctaagtgcaacatctttgaagaaatttgttttccactatggggcaagttgtaaagaattgtttatatgcactcaactgctatgacccagaatcttaaaaatatctaataatcataaaatttgaagctctctggacttcagtttttcttttgaaaaaagatatgtggttaaaactgccccacttagattgcaatgttgatatgaaaagctcatgtgagcctctcaattccagagtttgtctttgtttccacatccctgaagcctagtagagtgtctggaagagaaaaagtgctcaacaactatttattaaatatataaagattatgagaaagattgttgaggatgttaaactgtaatataatataatttatattatctgtactaccctctcattttagatggggtaatgaggcccagaaaggagaaggaatttgcccagtgacacacaggaagctagtggcagagcgaggagtggttcccggattttatgcttccaggtctaatgctcttcacacacatctcaccgtatcggtcatgtcacagatgacacacactctctgatattagaaaaaccagtccaattcaactgatatttatggatttcttattaggctccaggcacaatgctaagcagtgcaggattacaagatgagctatacagtctctgcttttaagttcacaaatttacatggaggagaaaacacataaaccactaccaaatagttattagggtataaatattgccatggggatataaagaaactgctgggagctcacagtgaatggagtcatgatgctggattacaggatgagcaacgttaaaggcctttcatgggaaaagcgttttaggctattctttggaagaaacacagggcagtcaagctaagaagagaaggaacattccagtccaaggaaaagtacagagcacaaaggccctgcctcccccatggctgtgactgaaaggagttatagtagtaattatggaataaagactgagaatatgaatttgtccaggtcatcaagggccaggaataccacgcttgggaatccagactttatttgatagggaatgggagcttttaaaggttatttgaagtcaggcactatatttttttgaaagccattccggctgccgtagcatgaaagtggagggactggagacaagaaaagctacaaggccacttcaaaatctagaaagctttctccaaataggaaagtagtgctaagaacagaaaggatacagcaaataggagaaacattatggagaagaattagcagtgtgggctctggattcagactggctgtccctttgtgtctttacgcaagttaattatattatttgtgcttggtttcatcatcagcacaatagtgctagagcgcccactcacagtattggaggtgtaaagtgctaaaagggatgcccgtctcatagaaagatctcaataagtgttcatggtggttgttgaaacaaagatgttaacacagaaggcaagtctcaccagagctggcacccaccactgtcttcagtgcctagaaaagtctttggcacctgttaggcattaaatattttttattgcttgtattgtatcttctttgtattttctccctttatacctttcagacatgatcatatatgaagttatttgcataacgactacgactggagtcttcagatagtttgtgttgatatgggaaagattattaatgatatcatgattttctctaaaagtgactatcactttcaatgtgttggcagaaggtttgggaaacaaaatgtttaagtgaaggtgaacattttggagacgtccttccttgaatttgatttacaagatcagtgagctaaggttcagcggtaatgattcacaagcctggggctctgtcttggctggacaggtgactcactgggtcaccagagctccatgctttctctaggactcactttacttatctttgaaatgggatttattatctgacccctagaaatgctatgttcatgaattgatacacattgatggcttaagaggaggaaggcagtaggcagctgataaaaccctctggtttacaaagtttgcacagggtcctaagataatcaggaattgacagtccagttgtatctccaggggctgggattctctttgtatttgttcaatcatttgttcgatcaggattcattttccttcattaaaacatcattagtgaaaaatatccttccagccaccttcagcaaagcatctaagatgggccacacacactgcctagcatgatgtaaataagcgtaactaagacatagtctctgtgaacttaagaaagccatatctgttaaaaataagttcaatcaaaatttaaaatgctctcatagagatatgtacaaggtgcaaacaaagaaaattagcagtactcagtggaccaggtgttggtccggggaagtgtcacagaggagtggtcatgaacctggtgtctcagggtgagtcacatcacatgggttgtagggagaggagtgctcctagctgtgggagacagcacgtgcaaagctttgacaagtcatcactgagaagcagcacaaataggagggggaatattcaaaattaggctggaaagagagaaaggagtcaagtacgtagaagcatgcccgtgcacacgcacaaacacacccagaggctggcgggacaaaagaaaaagcttattggggtcagaaagacccaggctaaaatcccagcttcttgatcatttcatgtctcaattttctcatcattgatagaagatacatcacacctacctagcaatgctaatgtgaatagaaatgtagcagactttttatgaactggaaaataaaggaataagtggatgcatgtgcaatatgtggatatattagcattagcattagcatatatgcatagaccattctatatctacaagatgtgtgcagagagagatactaatggatggactgattgattggtttggtgatagatgctcaacacttaatttctttagtcccttccaggatttctacaaaagtctttgaaagaatagtaaaattatatgtataccatgcaataacagtgctgatgggtcagctggtaagtagccatcctccccgcactgccagctttcttgggagatcttgggcagctgattaacactgcctgtgtctgattcaccttttcaagtcatagagctgctgctctgcatctagacttccctgtcccaagggatttgctggcatcagtccctggccatgcctcatggagcagctgatcactgctgtggccccggtgaggccacccgtataagactagggtaccagggagcatgggagagaatgacaggcgggtttcacagttatgcccagcacttcaaactgtgtttgaacacaggtttctggattccctagatatgttcctcctctccccacttttttgtcagctgttatctcagttttgttgctgtgaaatctcctttctcctttttggagaactcttcctgattttgatctgaggcagctgtcgtctggtgacaaccagcaatttctgctaacggcaccaatataaatcttcggcttccccctcagttcttgtcaaagacgtgggccagggtgcagagtgagacagcagcccttctgtgtcccaaaggtaggtgagctattgggctctgccagctgtccttcgaaatcacctacgagatttgtttccaaattcctgccttgacgtggatgtatgttttgatagaaggttaatgcatacgtgaatacacaactttttgatttattgtcattgtgaacttatcactctttcctttaaattaaaactccctccagatggggatctgtgacacagatttatcgatctgcaataaaacctcactcataatctctacagctgcccattcgtcttctcgagaaagagggttcattactctggatgtcccaggaatgaaagcaagaagctaactttctcctttgttctactcctgtccctcctctgcttaaggcttctgtcctcctacctttctcctccacctcctcctcccacgtcatgagaccagctgaatcccccaaacacattgactccctgtccccatgttgctcagattccctcatatttcttcttactcccctgtcacccacctcaaagatgccctaccattttgtgggcacccagagagtgctgtgacattgaatctgatttgtggcagtacagcaatagcgtagccctctgctctgctccttccagatgggtctgcaccccccaatctggacaaaccactgtggactctggtagatgaatgagatcattagaaaagggagactcgagcagccagactgataggaatgagcacgagcggcaggtgggcaggtaccatgcttgtgtctgaatgggtaaatgtggataaagaattcttactactctgcgttttgctgggtccagagaaccctctgatttattgcttaggagatattccgacatgtgaacatgatccaggctgcttcccctggtcagcagatggtttggtcactgtgccaggaagcagaagttgctgctatctcagactcaacagaaggaagggcaaaaggacttttagagggatcagatggattgcctagtcagctcagtggagtattgattcagtgctggaattttcttggatttccctgccgaaaaataaagcatgggcatcatctagtctagtggatttccagtggagtgtcatgatacactggtgtgttgcagtcagcttatggtgtgatgtaatattccagtgtgtcacaagtaatttattacttctaataataaaatactaaagtttacaaatgaaatactttaaaaaatcagaacagattcaaagctacatttataataatgtgattgtcactcacgtgaattccaatgtgctttcctgagtaggaatgggatgttgttatggctaacctgccagaaattacccattgtatatagagatctagtggttatgtggccagtatccactactgggagttgagaattgctgttctggtctgtctctccctattaggcaggaggactgtccttagaagaattctaagtcctcatcctttgtgtcctcatagcagaacaaaggatgcagcctctcatcatcatttagaaatagcaaaggcataacccagacccaagcagtgattgctaatgtcaaggcttgaacccaagtgtacaaatcaggatttcagtgtgcacatcccactgaccactacctcctccaacaggcaggcttgaggagcttggggcagaggcaaggcacaggtggaggaagagcgagtgggaaatgaatcatcattaatcactgtaatcaggaagctaccccaagcaggtttaatcaccgcatgcagggagggctgcagagcaagtttatggtttacagtgagcaggctgacacagctgattgatgtcaaatatgtcatgatgtatattgtaaagcagggagatttaatggtgtaactctatggcaggcttagaaatgagctgctgcagagtgagtcgtgatggatgggctcatttacatgtaaaattgccaatggcattgacagcattggtatgtgaggggaagataagaggcacatagcaagattcactcttgtcctagtgttggaatattaaaatacagctgcggcagcatctggaatttgcaatggcctctaaagataaaattgtttttcacctttcagacctgagataatctacatcttttataaggttttctaaaaagtcaccataccgttcctggatcaagtatttacagtagatgatgctggtatgaaattcagttgtatggaggttgttagcaaaccaagacattccacggcttttatctccacccagcctaacaaccacccagtgcgtgtagagtaaccatatgaaagaccagagaactgactttaaaactccatttggtctcttccaaactcatgccctcttgtgttttttctctaccctttgtcagaaagataattagtcagcctctctctctctctctctctctctctctctctctctcttccccttcctccctctcattctcccccttattttctcctctaatgaggctgccattatcatatgtgggctaatgtctgtaatatatgagggtacggggaattgaggtatcctttcagtaaatagtgatgtttggatcacctccagttaagcattcaggcatgaggatagaccctaggacctgaattggctaactgaagagcacttcatatttgccccctaacattagaataatgaccatgtggcattagagcctgccttgccttctctccatccctcctttttcctttcctcctccatacaatgtacaccaggcattgtgctagggactggggcacaacacaccaaatgagctactagggatgccgagaaggaaagagcctcccaccggaactccagatggcttctacaaatgcctgagaggagctaggggagtgcatgggacaaaggtggaggggagctgtctgataaacaggggtgacatctcaggggaattcatatctgaaccaagactgaaggggacttgaaggtagcaaagcaagggaggccgaagtggagagggaagatgactgcaaggaaagaacggtgcccatgtctccacagcaagaaagcatttagcaaattcaagggcctgtgaggagcttgaggcaggagcaaaggagcatgtgaggagggacagccaggagatgaggctggagaagtgtcagtacccctgccagtctccagctggctcaaaggtggagactattgcaccgtaaggcatcccttggtttttatgacaacgtttcagttttgccctatctatggctttgcctttagtgagttgggtcttatttctggacaggattatcaattgtggtaaggaagttatgttgacaatcacaaaagttatcaaagttacgccttcgggggtgctcactgtcattcagcgtgtagtgctaagtgctgaggacttaccaaacatcaatttagtttaaggtatctcatgtattttttcagtaaccagatcgttgccatcatgacattgaatgatttttacacacaaactaatagcatctgtgctttatgattcaatcattctttcgcaccttcaaaacatatctagtaagaacctactaagttcaaggcacactgctacgtgctggggatgcaaagatgaataatatgagattccttctcataagctaatgaggaagacacatatgcagaatcatggccaactcatcatagatggagctcctgtaaaggacggatgaaggctgtagggagtacaggaacttatggcctttctctgggggagtctgggatgctcaacaaaagagatatgtgagctttatcttaaagaatggttaagacttttccataggtagatgttacagatgaggaggcttaaagagtttggatgcagacagctcagccacgtggagtttcactgagttcccccaataaaatcaaagtggtattataattattagatacattcagctctacaaatcatcttttctttcttctagaaacttgactgcaacactacttctgtgatgcaattggcagtataacttagtggttaggaccagaacctctaaaatgacagagacccgggttctaacttcatctttaccatctcatagttgtgaggccttgggggagtcccttcaacccacagccctcattctcctcattcgtaacagtgcctacttcacagacttcatggagtattaaaagaggtaatgtactggactcagtgttgagcccacagtaagagttcaacaaatgttagccatgtatgattaataataatattattattatctgtcatttaacacctaatgaagcattgactgaaccacaacctagtgactttatagagctaatgtacttcccagagagcttaatagagcgctccactcttctctcttcagaaagaatgtgctcccattgcagtaaatcaccaacacaaaagtgggtacacatggtccctattctctgctggccactttgggttttactccaattattgtgctatgttccctggtgtttccctttctggctactcagctgaaaacttcctgaatgcctagtttacttccccttccagatcattaacaaagcggctctgaaagcccacacctggcaccactccaccagctcccaaataggtgcctccccagctggtcctttgccgaaccagattgtgtgtccacacaaatggttctgatcacactcaagtgttgtcatcctgaaagcacaggttctggaacctttccatacggtttcagatggcagtacattttcattcctcaactgtactccctgcttaaaaaggaaaaaaaaataaaagaaagaaaatgtatcaatggtgtggatcctaaaaggtcgcctaatcttgtccgttggtaatcaatgcaaagaaaataaaagtaaacagacaactggagtggggaggtgagcggcaacaccatttaaaaccatgcccactccttgctgcgcgtcttgcgttttgcctccactgtcctgccgggctacgtctgcagcctaatccaccacctctgcagctgcttttcattcgtgttgctacactcactccagcgtccagtctagaaacctgggctttcatcttgatttctttctattcctcagccatcgcatgcaagcaatcaccaagtaaactctgacaacccagcttcctatatatctctccaaacccactacctctcccagctctgctgccagcttcccataccaacacactgcgggccatggattttgatcttcttcattttgccctctgccagtccgttttctattgagcaatccgagatttttaaaaatgcaagcatgatcacctcgctctgcaggtagaaatactcgtgtggcttctgtcaccctcaggatcaagctcgaactcctccgcttggcttagagggaccatctggactttcccggccctctcatccccttgcggcctatggctgttcttctgcccccgccttctcccacctcacctttctgggtgcactggctaactacagtttttgtgtctgataagagcttacaaaggactgccttctgggagctgtcccaccgtgcccgcctcagctctctgccctcttgtatgctgggccagcttccccaccctccatcccagccctcgcccaccctgtgctgggccagagctgctgtctccctagctgggctgtgcgcaaagagcaggcaccatccctcctccccacagcaagcttccagcagggttctggagcacagtagacactcagtatggactggtagagctcttaaagaattttcttgaagaatccttttgagaagtaaaatgaagccagcgaggaatgaaaccaaatttgtcctgtgctctgcagaggaaagggggtggcttacccaacccccacttcccccctcctgctgcccgcgcctctcccccagcccctcggatcaggatccagcctctcccttctctcaacttgacagtcagcagaagggcctaaattgggatattttccagaggcaggttgagtaagcactgactgagctgaccctgatagaaatacttaagaagctttgcagggggattaagcggctgcctttaatcttgcttccttccgggtggccgcggtgggagcggattccagcgtgttggcagggctgggttgagggtcctgagccccagctggtctctgcaggaggcggggcttgtgagctggggaaactgggagttggagatggggagagagatggcggtgaaactgaccatggtttccatttcaacctttgaaaacctaactgaattgccttctcttttctcctcctttattttcaattcaggaagctttcatatttccagatgtgaggtgctctcattagttgctggaaaattctgccttttttgattatgtaacgaccaaggctaaatccagagatgcataagcggaagaggatttgttctggatcacaccaagtgaatccatggagggaaacctctgaggctcagtcactcatcatgaaagcatctcagatgcaacaatcctgactcagtatgctgttttcacaagggtcatgtggcatagcctgggagtacaatgtccatgccttagtcccttatactctccaaataacagtcaaccccttagattacctaccatcgtagttttttaaaagccgtggaagaggggaaatgatatttttactaaatctggggtacgtatcttcctggataccctgtatcttagaggctttgttaatagagattacagacgaaatgacggtagttgacttctgggtggggaaacaagttcattgaatattaaagcaagaaaaaaaaaaaaaggaatttaaagattattagtccaatttatcactggcaaataaggaacctgagtcttggagacctgtccccaaatcgtacacctctataacaaccctgctggattagaattagatcccactttctttcagccataccaaatttgaggttttagaggcgaagtgttctgtaggtatctttcctaggagccctattcagagctaaattgggctattcatcatttgagcctcctttcagcttgagggcttagagttgaggttttaggtcaagggtccatacttagcatagcctaaaacactgggcactcaacgcacgttaattaaataaatgttaaattcatgtggtttagtttacatgtattctgagtgggtttctgagtgtctggaacttccaaatattttacttaatcttccctgaaatttttaactatttcctctccttcctgtggcacagcatctatttacaagtatttctgattctggccacatgttgtgtgggcattttaaaacccagggggcacatggggctgcatcttctaattttggtttggctgggtctattattttaggttttaattttagtttgttttggtctctccatgattactcagtctttctttgcattcgcatccaggctgttctgagtacctgtatccctaaaaggctcaagcatatcattgtacttgtgtattaattatgtatttcattcattactactgtacctcgagcaatacgaccttagggcatatacctgacatttaagactaacaatgatttcacatacagcatatctgctcaaaaaataaaatcatcattagagatttagggggagtgagaatttaatggatagtactgactttttttttaagcaaacacttgaccctaaaactgcttctttccatcttttgcttcagcctgacctagaagtagctttgacttacaactgggcacctcaggggctcctctcccagcagattcactgctgctatcatcccttagccaatgttcatgtttattggtggcggggagagcccacctgaacattcaaggaatactcagagttttagtgcagcatgcagctgggtatatacaaaggttttcctgggaggggcctctgagcttccatgaggatggttccctctgctccacctccttccacccctctggtcctacctttctgagctgacacattgtccagcaccgtgaagttggcaacacatcccaattaacaataattgccagcccttgcgggcactgactagactcatcgcagcccctgtgtaccatggtttacactgaaagacttctcatgggagctgagaggcccttggggctggtgccagctcctgttcctgggtttgaactgcaccacttagtctttataaataagtgtcagtcccattgactgtgctttattccaaacagatttttcaccagcaacaacactgaagatgataggcgggggagcaggggtgttgacagtacacacttgacacacatcagcggcttttggcacccaccagtcatcaactaaaggagtctgggagggacaatagactgaaatctccctccttgcttcagaacccaccttcacgctgcagtgcatcctttacagtgatttccagggaattaatttaaaattgctcgttcagtcctgtcggtatctcctcagagggctcccaccacccaggcctgcctcatttcaacccagactcgctcccattgactttgggaaataggtaaaacatacttaaacaaaacagaggacagtttttaaaggagttataaagatttttacctagtgacatagactaaaatctcaacaggtgcaaacttattcttcctggaagagggactatatccctcttggctctaaagacatagatttgcatattgatagaatccatggatttgtatagctggatagggatattagaaaccattaatcaccgttcagcacagcagtcagcctcttgaaagttgttgggggttgggggcaggctatttaacatctagtcaagcagaaatactcaattgccaaaaacaggccacactgattcatccaacagaggtaccattcattcattcattcatttaatcattcacaggatagctattgcacgtcatttgtgtcaggccttatcggtggctggagataatgaatgtgaaaggcggttgctatcgtgcttttacacttaccgatcatctgagtgtctgtccttctatccagaatctatgtggactataatgggaattacgaggtcttctctctgccttttactagatacacatctttgatctccccgcagagatgcagtacacggaaaaggaactcagtaccatttatgctggttgttctgcatgagttctgggatttggggcttcaaggtcacacagctgtcaaatctaaagaaaccatgaagatacctagctatcatcccctcctaactgtttaaactgttgaggacactgagatttgaagtttagtgtacctgcccaatgttgcaaagctaaattctggcaggggtgagaccacacatcacctgccttcatggcctgctggttgctctgtctactctgaagttcatgacgaaaccccatgagtccaggtgaagaagactgtaagagaccctctagttcaaaacttctctactggggagaccttgtagttcaaagcttctcaactttggctgcacatatctagggacccgagggagcatgccacactacagaagcctgagctgcacccccagaaatgtaagtttacttggtttggggtcaggtctggacatctacatttttaaaagatgccctagatgattattgagtttagggaaaactcagataaaccacacatcctactgtcctgctcactcacatacccgctcactcattcactcattcattcattcatttgttcatttcacaattttcctcaaacattactttagcaagagagacatacataaaaaatctccaaagtcatccacatcctgtgtcaggaaaatcctgccaggctgttggcacaccagaggcactttccaagttcctcacccagcttttaaatatcactaataaacagcactagccagcatgcccatgaaagcctgcagcttgtccccatttccaagctcactttgcccaggagtcactctggagccctgccaccatgggatggaaacacgtccgtgttcggggctgtgacagaagggcaccaggagcttgttgctctttatttacctttaattagaattttcctgtgtgtctctgccctcccatgagagcagcagcaccctgttaatgggattatgtggtatggatgctgctgtggacgtgtgggccgctactccgtctctgaatttcacccagataattgatttcggtctgttccctgacactcgccttcgtggcacagggtgttattagggcctttgttccatttttgagtgacaaagcctttacatgccagccaagcaaaagcaattgttgcatctctcacttttcttattaactaacagagaattgcaggcagcttgaagcccgctgagagaaataataacataagcggctgcttgggcgcaaagtgggtcctttcaaccacaacagcctggtgagattaacaagggcccctcctctcctgcagccactggatccccactctccatcttccctgtctgtctccctctgcctttcccttatcgcctctatgtctgcttctggaaaccctctggttctctaaagcaccaagtggtccgtggagagcaggagtcctccaagattctgggtaggcctgctccatgtcttaactccctgtggattggaatcacgcattcccatatcaccactagttggtgtttctgtgtttccatgcttgcttttcatttttaaatatgtattatgaaataaatatgtattatgaaagaatttagacatataaaaaaggatgagagaaaatgaacattagtgtatctactacctagattaatttttttaaatggggccaaggccacctgagagtcttttcctgatctgctctccctctctcccacagagttcactatccttaatttgatatctgtcattcccaggcatccatttacatttctaccatatatgtgtgcaccactaagcaatacaaaggattggcacttttttaaacttataaagatattaaataccaggtgtatttcacgatctgaaagtttcgtgacattttttcacttggtaaatgagctggagtgttctgtgatcaatcacaatgttgtacttagcaatccatttgtcggaggatgttcagggtttaaggtgtctccattcattttgctattacaaacgcggccactatgagtatttggattcacacctccttgtgcacacacacaagcctttcctgacatacaagcctagaagggttgtaaggattgctcatcttcaactctagcagtaacaccaagatgcctccaaagggtttttttttttttctaattatgtaataagatgaaatgtagggattggtaatcccatttcacacgcaagtacaaagatgatttctccctgtgtttggccaggaaggcaacagcaatgaggaaaggaaaattacttccccctagtttctattcttggtctcccactatcccaggtacctaagctgtcaagaagcattaccatcatcctaatggaactgggaactcattcctgttcctacttccttggtaactttgttttccatccttgagccattggcaggtgagatccttagtcatgacctgctctttcttgtggtccaggcagggcaattcctgctgtgtgaaaagtactgtgtgatcagttacccagagctctgagctgataggcactctgtttccatggttgcttcagcaagtcggtggtcacgccagcaaacacttgagtctatcctgaatttgcattctcatgctcactaattttgtggaccacaatcaaatacttaacttctcagatgctgtctcctcatctttaaaatgggaatgattgtacatacctttcagaaaagttgtgagaatcacgtaaacaaagcaaagcgacaagcacaatgtttaatactctgtggtcatcctgtaaaaagcataaatgactttaaaatgcatgctttgctctgcgtatgtggcgtgaggtggaggaagggctctggggctggggagaaccatgcccccactgactctctttgtttggattccaaatactagggttggaagacactgacgagttttacaccattgactgatccatgatagtttagaaaggaagctgatttcacagaactttcttaggtctactagttcttaccccaaagaggctagtaaaactagtttctttgtggacaaaagactcaaatgtatatatgacacttctgccttgattctgtacctctcctaagtgaaattttactttgagaaggtagaatttccttcctttatcaataaaagctcaggaaagtcgaaacacttttagagctccctttaggggtacaagaaaggacagggttcagaacccattgtatgctcccaggcacataaagtgacagtactgctatgttgtcttcttcttagcagttcttgttttctcatgcagtcgtcaccccgtttaattacccctctgtctttgtttccatctttatccactcccctctcctcccttcttccttttcactgcatcctcatcctttcttcttcattctcatggcctcctggcacctccacaattcacctgcttgtccccaaagactctcacgcagctttcttgaatgactgattactggaaggaatagaattgttaaaaacaacaatgttttctatacaccagtgtgtaaaatgtataataataaaatggaattgcactaaatgaattatggtttttttaaaaaaacaaattacccacctgtcaaatactattaacgctcaaatcagtgtgaagaataagaacgcgtgtacagagggagcttttcttcctttgtaaaacaaataccagcccctcataacagctgctttcagtgtcttgaatcagcaactgataaggggaaggaaggtagaaaactctccaacaagtcgtttttcatggtgtcaatgtaatgtgttactttcgtgtgtaattcagatgtgttctcatatttgagtgaagggttcattaacttcccattgcttaatgatattccataggatagggcaaatgagaaaggggaacttatgaaaacaaaagtgagagtggaggtgggttttcaacgttcaaggactcatttgcttctcaaaaaaagcggctttgaaagccaaacacacagggaaataccttgtttttgtgaatatgctcaaaggtagcattgatctggacaaagaacagtagcttttttccttcctttctttcttccttccttccttctgtctccctcccttcctccttcccttcctttctgccttctgtagtttattttgttttatctttaatgatgacaggcaggagacaaatgcacttgttcttcaatccagtgagattgtttttccatagaagcacgtctacgttagtgttaggaaaggaaaggacagttatattacttgggaggggagatacactgctggtgattgtcacagggtatcccagagaccatggaaatccttcattcactcttagagggttattttcttccctaacattggtcaaaagtaactgccccttaggcagagcagaagccacacatgtcctcagccttcagcctctcacagctttgttgaattcatctaaatctctcggttttgttctccacgtgatgactaagtggccgatgcagtaggtaagcacgaaattagagggggttaactgtattatacacagatttagctcacctggcccaccagagacgcggctcagaccctggttgaattaaggaatttgctatgaaccctctagctgacctgtggccagcattctaattaataagttctatatctggcttttgttctctgttaactacaaataattcttcttccttgactttaatataatagaatacactctttaaaagtgtcttggggaaaaaaaggaaatatagacatagaaatgattattaatgttcttgcttaattgaaagagtattttcctgatagttatacgtcttctaattacctcaatgtgcattgcttaaaatttaaacaaaacaaaacaaaacacctttgggttagagcagtaattgtgtttatattatttcagctagagctaagtggatttcaatggctaacctcaaatgtaaaaagttgttactttggcctatgtttgcatttaaagtgcacaaatacaagggcttaagtcagaaagacatgaaagcgcatggaatagttcccagtttctgtttgttctttatgcaattcaaggctgtgtatgattacagtgttggttgcatttaagtgctttgttttcccctgggttacaaacatctaagggaggcgggaggataagaggataaagagaattgaaaagaattctcaaaaggcattgtgaagcacatcagctgaggagtgagttataaatgaatctaacagagagacatttaatttccttctacataagcttgaggctgaagaggaaaagttagtgggcataactttacttacaaggaacagcaaattttaacaactccttggtgtaggggagaataattcaagccatttggtagtaattatccattacatttgttcagcacattggagttcattgtcccctacaacttctacataatttggctccacaaatatttgttgagtgtccgctaagctccagacgtagagctggctttgggaacattaggctcaaagaagtaatagcccccactctcaagggggtcacagtgtacaagatggacacataagataataaaaggtaatgcggcaagttctgtaatagtagaaagcgtaaatccttagctgagtagaagagtgagcaattaaattctgcttggactacatttagagtaacctagaatgtgtattgatgtaagcattcattcatttatttattcactcactcattcaaagagcaaatgtgtttttctagcctgtattgtgacagacattacactggtcaaagaatgacttgagtgatacacaattatgagctgaaacatgttgaatagtgaatgaatcttacttaggctgtggtcttcctcagggatgcctttctttatttggctatggaactggggaaagagtaggagtttaaaaagtaaatgagagagggaaaatattctggacaaaagaaatggcttgtgcaaagctctgctgtaagaggcagaactctagatgctggaggacaaggaaggccagtacagctgtagctgacagagcagaaggaacacggcatgtacgttagtttgctagggctgctgtagtaaagtattgcgaaatggatggactacaacaacagaaatttattgtttcacaatcctggaaactagaagtctgcaatcacagtgttggcagggtggttccttctgagggctatgagggagaatctgttccaggcttcttgtccagcttctggtgggttttgggcaatcattagtgttccctggttatagatgcttcatcccaatctctgccttcatcttcacaaggtgttcttgtatgcatctgtgcccaaatctccccttttcataaagacaccagtcatgttggatgagggccccagccaattccaacatgacctaatcttaatttaactaattacacctgcaattattctgttttcaaataagatgacattctgagatattaggggttaggacttcagcatatgaatttttgtatggtggtggggggtggggacaatttaactgctgacaatctgggatgaggctggatatgaggctagcacttgatgtctttggcttcttcgaggactggtaagtcatgttacggacttggttctttatcctcagattttgagcagaagatgccatggtcaaattttcatttcacaaaagtgtcccaacctctgcactgtatgggaaggttgggtgtggacagacctgttgaagacagttgcagccattcgggtgagaaattatagattatgatataccaggatggaaaagatggactggagaaaaattgatagattgggaagatgtttaaaaggcaaacaattaataggaccagttaatgggtttgggtgataaaaagagggtagggtacaggatgacaactggatggaaagtggcatcatttactgacacagggccagacttaacagagaaaaatatgaattcagtcttgactatgaagagtttatagtaccatttaaatatcctagaggaaacagcgaatatgtttttggaggatttttgaggttagaaaagaggtctgggctagaaatataaatttggagattattgttttatatgttaatgcataaattaaaccatgcacaagaataaaatgtcttggggagagggtagtataaagtggagagagcctaggaatttgctttgataaactccaactttataggacgataatgaaggaagatgcctacaggagaatcagaagaagagtgaagaggtgaaagtagccatacaagtcaaaagaagaaaatagttcaaaaaggggcatgatcacaatttagattgctgatggttgaggcaaatgagatggggcagaggagggagttgcccactagattccatgacatgaagacgaatgaagccttagcatgttggcagaagagggaagaagaaggaagtcagcaagataacaataaggagagctagaggtaaaattgacaaatgccatgagtcccagaaaagcaattttaacaagaaggtagatgatatgggagggtggatgatcatcaggaaggacgtctctagactctgaagcagatgtcagagtgagagaacacagagccaaggttgcagacggcagtgtcctcagtagatagacaggcttggacagtcagctacgtcgagggattggtcgtaatattctaaaaaaaaaaaagtcagaaaaagtattctaaatggcgcagtggaaggtgaaaaaagaatggaggaaagaagagcaaaggccaggagtgggagggctgggcagggaggaattttttcatttgatagtgacagagatgagaagggacaagaaccagggtggttagtggttcagtctcaaaagtccctttcaggaggctgtaagaagatgtatactggtcccaaactgccagagtgttggccctctggagctttggtgatatgagctccaggatctgcagtttcttcctgtaggagtagcgtgcttgcaaatccaggtgtggagtttatgcagtcacatggcatggagtagtggcattttatctagctggagtgcagaagaaaggtctgagagtctctgtccctctagttcatggctggaggtggtagtgcccccagggagtgcattaattcatttattcatgcatgtatccattatttcctttattcattcaacaaacctttttaagtagctactttgtaccagactctgaatacacgttgatgaattgaagctattattcccaccttcattaccctaaagtctatttggaaaggggaaaataaatagaaaacaaaatcaacaaacataaaatggaattacatattagaaaactgctatagaggtaaaggcaagatgacacaataggaaataaaaggagagccatacatatacagatactttgagcctgcacagtgtgagatttttaagaatcagatggatctggcaatgtgaatagttggagaccaaggcatcctggcagaagtgggaaaggccagtggggacaactgtgggttcacacacagtgggtgacaaggagtggctgactgttatggagaaaggattgtagaaggggacaaagggatgtaagaggggttagtggattcagaatccatgtgtttcagttcctgggtatcccatttctgtttaaaacaatctgcctgtcatttgtcctttgtggacacattttcaatgtctaatgttttgtccaaaacctgaagccatgaaaccacactacttcccctttatcgctgtcctctacagtgatcatgcagataatccaagatcaggaagtcaactaagagagaaaacaaaagtctatattttcacactgagtagttatcttgaagttcaagttatgtatatgctggtaaattacagatatctggtgtccttccccaaattaacttgtcacattctaacaaaatgatcaaattttctggacagctaccttgttaatttctaagtccattctcgaagctgccctctaccatcatcaggtactaataccctccaggtctcctattcccagacgttggcacacaaaccagttctctactggattaaatttttctcagtgttggatccttacttttctacattttgtaggcagagctgtaagatggttaggctcatgactctggagtcaaactgcctgggttcaaatatctcactcaacatataggtatgtgaccttgaaaagctattaaattctacctgccaaattttccttatttgtaagatgaagaaaaaaaaaaacaactacctctcaataacgtttttaggtctaagtgagatgaatcaggcaaagcacttatcacaaccctgtgcgtagcaagtacgtagtaaatgtcagctgttattatttgtactctcgtcactatcaccattaccaccacgaccactttcactattaacaccagtatcaccaccgccttcaccattattgccaaaattgtcactaccacaatcatcaccatctttgccatcactgcaacatcaccaccatcactcatcatcagcatcactaccaccttcaccatcatcaccaccaccacaactttcatctacattgccaacattaccaccatcaccaccaccttcaccattatcacaaatatcaccaccatcatcatcactaccactaacaccttcaccattaattctggtattgccaccatcatcaccaccaccttcacagtcatcacgaacatcatcaccgccaccttaaccatcattgccaacatcactaccatcactaccaccaccactgttactactatctgattgtgatcacccactgtcttttctttccaggtttcacggcacgtctccaaaccaggacaaggcatacaacttttactcaaccagcttctttgttccctcttttcttctcactaacctagtctctattctaccttccaagtatcagagtatctaaagcccactttaaaaattgaaactctttattcagtgcaattgatcataagaaaattaaagctagtaaaaatgttccttttagccttatgactacttaccctgtcattaccatcttttatttctctctctctcttcctctccctccatcactctccctctctctctctctgtctctctctgcctccctctctctcacatacacacaagcactcacacatacttatattgaaagttcaagatcatataacctccttaatcacccctttgcctaagcttagacccagtaatgagaacttccagagcatcaattctccctatcatttcagagaaaacattttttctgtttaagagtcacttaaaaaaaaaatgattacaaattttgctttagattcatgggatacatgtccaggtttgttacttgggtatatcatgtgatggtgaggtttggggaacaattgatcccattactcaggtattgagaatagtatccaatagtttatcaacctttgtacccctccctgtcccctccctctagaattctccagtgtctattgttcccatctttatgtccatgagtacccaatgtttaggtgtcacttataagtgagaacatgcagcatttggttttctgttcctgcattaattcacttaggataatggtatccagctgcatacatattgctgcaaaggacataatttcattctttcctatggcatagtattccatggtgtatatgtaccatgttttctttatctgatccaccattgataggcacctatgttgatcctatgtctttgctattgtgaatagtgctgcaagaaatatatgtgtgaatgcaactttttggtagaatgttttattttcttttggatttataaccaataatgagattgctgggttgaatggtagttcttagttctttcagaaatctccaaactgcttcctacagtggctgaactaatttacattctcatcatagtgtataagcattcccttttttctgcagccttgcgagcatcagttattttttgactttttaataatagccactctgaccagtgtgagatgctatctcactgtggttttatttgcatttctctgatgattagtgatgtggaacaggtttttcttaatatgtctcttggccacttgtatgtattcttttgagaagtgtgtgttcacagcttttgcccatttttaaatggggttattttttgcttttcaaattgttcaagtttattatgcattctccatattgacctttgttgaatgcatagtttgcaaatattttctcccagtctatagattgtttactctgttgatagtttcttttgctgtgcagaaactctttcatttgattaagttccacttgtcgatttttgtttttgttgcaattgtttttgaggatgtagttctttcccaaggctgatatccagaatagtgtttcctgggttttcttctagcattcttatagtttgatgtcttacatttaatctttaatcctccttgagttaatttttgtatattgtaaaagacagaagtcaagtttcatccttctgtatatggctagccagctattccaacatgatttattaatagtgagtcctttccccattgcttgtttttgtcgactttgtcaaagatcagatggctgtaggtgtgtggctttatttctgcattctctattctgttccattggtctatatgtctgtttttgtaccagtgccatgctgtttgggttactgtagccctgtagtatggtttgaagtcaggtagtgtgatgcctccagctttgttctattattgcttaggattgctttggctatttgggctcttttttggttccatgtgaattttagaatagttttttctcattctgtgaaaaatgacattgatagctggataggaataatgttgaatctgtagattgttttggacattatggccattttaacaatatcgattcttccaatctgtgagcatggactgttttttcatttgtttgtgtcatctttgatttctttcagcagtgttttatagttctccttgtagatatctttcacctccttggtgagctgtattcctacatattttattttattttattgcagctattgtaaatgggattgcattcttgacttggctctcagcttgaaagctattggtgtatagaaatgctactgatttttgtacatggattccgaaactttactgaagtcctttatcagttcaagaaatcatttggtagagtctttagggttttctacatatggaatcacatcatcagcaaagaaagatagtttgacttctttttttcctatttggatgccttttatttctttttcttgcctgattgctgtggataggacttgctgggactcacttttaaaattaataatagtagcttcctaaacattggaaggctccttttcaggtctacatctataaaatttagtaaagaactaaatttttgtagtttgcccttgcttacaaggcatattaacaaatctgatgcatgttgaagtcccagcacaaataggagaaaggactagtatctgcttttgctgataagcaaacccagccatgaaatagatgatatacccatgtcctcatggctggaaaatggcagaatcttagcctatgccgtccacacaccagaaccaggctgggtcacatgtgcattctagtgggagtcccagcctgagtctggtgacttccccaagcctccagaaagtcagggctccaagcaatttgtacagtgttcatgccactgcttaaaacttcccagtcccaaattactaaatgtgtaaactttttagatcttaaagcttacgtagcaaatagctttctcttgaaaaccactccataaattctagggaaaagtcttctggatttgtgttcatgctgtgacttttctgtaaaaatcaggtagcagatactttgactttggatctacattaaagagattgaatcttacttgaccactctttgactaggccagtgttcagattatctccgggtttctgagtcctttaaatattcataaaagcataaaaggtcccaaaattaatcccaaagtaattaattctcccaacattaatttattcctatgtaattatatatataatatatataattaaatataatatatatatgaaaagcctagtacatatatatatgtgaaataataaaatcaatattagtccattctcctacagtggaagctttttctgcatacaggtggatgaaccaaaagaaagcacttcgttccaaaacctactcaaactcccaaattgcccttcaaaacacgccacacacacacaaaagcaagcataaacacttgggtcaaactccgggtgttagaagagaaaaaaaaaaaaaacagagttcatatgtatgcgtgatgcttcctcttctcactcatgggttcagagtaattttttcacttgctaactcaatgtcagagtctgagagacaaaattcagtctcagcagccaggggactgagcatgtgatgtttggcaaagcaatcattacaaagaaacctcacttttaagaaaaaaaaaccatggataccctgaggaggctttgacctgtatatttgttctttgatggtaaaaaggtatcatgattctaaagactcactagcagtcaagaatttactataagccttaattttaatcccaatacaggacacattttgttgtgataaatcccagtagcctatgaaaattaatcttgacttcaccctcagcttggatatgaggcagcttagtgtaggttaactcaaagcagggtctggcattggggttcttggtccctcccttctaattccgtggccttagatgattgatgaaggctttctaagcctcagtttccttggctgtaaagtgaagaaaataatagtaactccttccagagtcacattggagataaactgagggaaggtgtatgtgtatatgtatgtacgtgcatatgtatgcacataaacacacacaggattaaatatatatatagacaagggcgctttaaaaactgttaagttctatccaaatgataagctaattttaaaatataatttaggctgctctgttgtaaggtatttgttgtaatgagatttctcctttactaattgtgaactaatttgctcatagagtgaataaagtatttataacatgttagaattaaagttgtcataaatacccataaaataaagtttttctctacaatagtaactagctcagaaaacattaagctcacaaagtgtatcctattggatgtattttgaacagaaatttatgtatcgttctgaccacatattttagatttcacctgttcacgttttccttagctatattgtgtgatttttgtattgaagaattgtggtgcagtggaaaggtgagctttgtagtcacataggcctgagttttacagtgcactctgacatttcctagctttgtccttgtgattaattcactttctattgctatcaatatctaacaattggcagacacttgatatgctccaggaaatgtgctacatgcttcacatacactacctcatgtaacccccagcatacaccatgaagtagatactaattgtatccctattttacagggaagaaaactaaagcacagagaggtttatatgccttccctaaggtcacacagccagtaagtgacaaaggaatggaagacactcatgggggaagccacctcaggagactgagtgcatctgtagctcacacatgagtcaggacgtgactgtcaaggctgaatgacacaatcatcatgaattgaagtcttttcaaatagtattcagtgacatgaacacacagtggtccttggttggttctctccttaaccctgccgtgttttccattaggccctgtaccctaaaggaaggagctctgcctctttgcttctgaggaggcaggatagcctagtggttaaagatggggggatgcaatattcaagggcataaattctattatgcaagaaaggtaacttcctttttcttcctgtaacaactcaatttctgtttcaagactttattttgcccaaagacagaaatcttcatttcgaagtcttttttcttagaagttttataaattctacttgctcttctccccaccctatggtattctccatttccactcaggactcatctaagttctggaaagcttacatagcctcatggcatgaggatgaggtggaggtagggagaacatctggcataagtacagtctcttctttatcctgatatcttctctttcgtttgttcattggtttctgttcattttctcccttggcctctgtttagtctctgtttaattctctgccacggtgctactcagaatagggaggctcagggcccaccacactcacgtgccttgagctggctttaaaggttgaaattcagtagtaatcaggcttagggcctccttccttctcactctatattttcccaatacccactcccttccacatctatgggcttaactatgacctatcggccatttctttgatttaattccatggtttctgcatctaactaattactgatttatcctttactcagtcaataagtgtttactgaattgttttcatgtggtaggcactgtgctggggttgcagctgtgagtaattagaataggatctgacgacgtggagcttctgttctggtccctatcatcctaatcatccctgtcaccttcatcatcacccccaatgccatcataataatcatcatcatcactataagccaagcatcttcggaatagtgtgtgtatatatatacatatacatatatatatatatatatatgtataatcttcacagcaacgcagtgggatagtaagattattatctgtactttacacatgaggaatctgaggcacagagggattatgtcactaaacacagttcacacagctactttactattagagccatgatccaatctaggcatttttgatctgtagcccataatttagatcaccctgctatactgcctcccattggatatgtggcctaaaacatttgcttctttaatgtctaacaagtacagtggagttgatgttcattatggtcaggggtcaggtagctaaaatcctcagagagaggtcaccaccattgtaaccctggccattaattcattcaacaaacagctttaacattcttactatgtgttcagtattgttctcaatactgaaaaatacagcagcaaagaagttcagctaacatccctgtcctcatggggcttacactctggagactggatgtattataagcagaacaggaaattttaggagatggtagataccaattatttgttttctgccaagatttaacatatgtatttgggctcagatctgaagatatttctgtttgaaaattgaaaattctgtttgaaaatacatgtgtgttgtatgtgtaccctggagtctatgaaagtaaacaagtgccatcgagaatgttgctgggatcacttgtaatctttctagtctgaatagttaggatattcacgatacgtatatgaaaaaagacttatctctaggatggataaacacctcctacaaataaaaaatataaagacagacattcaacagaaatagaagaaagatttaaacaagcacttcacaaagtgatcaaaaatgtgtaaaaggactcaacctcactaatcattagagaaatgtaagtttaaaccacgatgatatattgctatatatccatcagaatgggtaacattaaaaaaaactggcaatactaagtgctggtgaagatgtgaattaactagatctctcataccttgctgctgaaacctaattggtacaaacactctggaaaattatttagagctattaattacagaatctctcattgttcctctcagcatagatttcccaagcatagatatatacatgcaccaaaagacattttacaaaagtgttgatagatgcactatttgttttaactccaaactggaagccacacaaacataaacagtaaaatggatatatggatagggacatatccacccaatggaatattctaaaacactaagactgatgacatacacatgtcatagaagagtgtcacaaatacaatgttgagcaaaagaagtcagacactgaagaatttataccaaatgattctgtttatatggagagtaaaaatgggcaaaactgatatagtcatgaaagtcaggccagtgctacttttagagaatgaagacaggctgcaagaataggaggcttctgagtacaggtcattttcaatttctttaactgctggtagtaatgcggttgtgtttaccatgtgcatacttatcaagctgtatgcttatgatgtgctcattttttctatatgtatgtaatgtttcaacaaaacttttcttaaaattaagttatgtaccaccttatatttcctgcttatccttctgttctccaaggtttctcatgaaattctaattctgttgaactagttcgagagcttctccaagccagaattcttgctgtttcatcttgtaagccccctttaaatcttcttggatctaaatagggaatgaattaaaagatttgctatggaaattctcatttgtatatgtaattgtgtagcacagtgcttggaacactgtatatagacagtgaattttgacatgtgaatgaagggatgaattaatgttttctaaatcatattaatcaatttgtttattatctacactagtatgcaatttatttgagcctaggaattcaaactctacttttccaatgagcacattcccctctgtatgcttctctccatgtcatgagtggttggacctttactgagttgctgcagaagtcagttacccaataagggatgctttgtttactttaaatatgtgaaaaatggtttcattcctcaggggattattaattactggtttactaattactctggaactgattttacagaaaaaaatctaggcagttgtttgaatgaatccttatttaagtgagtaattagttggatcaaaataattgactaaattaagaaattctttaatagacattatttaggtgtcagtttgattttgctcctggtgatgtgtaacaaatccattgtgtgattagtaataaagctgtcactcctgaagggatcttttttaaaacaaaaggaaagtctcttttgaggctggaaaagaactcaagtacacataagctatgaattatttttcactttgtccttaaactttagattacagacaaaacttaaaacaagagtcaaggtacaggaaaacaagtacatacgtattaacataaaaactctggtggggagggaatagatatatttcaagccattttggtgtcaagaccaaagtaggtgggagccacttcatgatatgcatttccacacaggcatctaccgaatttgcacctttgtcagggatcaattcaaaaggtacctcctcttctctgccttctcttaccctcatcccctcaattaagtatttagtgattcctaatgcagtgttttctaatatattgtgaaaatcctaaaccactcttctcattataatttgggtattcactgatagactgtggcctgctggagtgatttctttgtaatctaagaaagtagcctagttattgtacagtgagtccagaatgagttactatttaggagagtcacatctaattgggtcctcattgagaaccccttttctactttgcgattaacacagtttttctaagatgaaacagatcacccttaagtaataatactccttctgctacatttggcctgggtggtcccggatcctctgtttgaaggtgtcctagacaagcccaggcaaaggtttttcaacgggccccaactcctgggtggaaaaggttcctgtgcacccgagggctatgcgtggtgttgcgggagacctgtcattgctgcctgccgcgatgccaggccccacgctgggggagccacccgggtcctcacctggagatgtggctctctgtggcgacgtgccctgacgtgggaacacatgttctaactggagatgactttaactgcctgaagtcgaaaaaggttgtgtgtaataccaggttttatactaacccaaaataaattttctctaacacgagttttcagacaggttggcctaatatattaacttctgtctgtgttttgaatagtcaatttcacggtgaaatgagttcttaataatatatttaccacctgggaaacatctcccagccatctggaaaggagaggggatttagtgcctccaaacagagattggatttttttcacagttatttatttatttatttttacatcaggtaaaaaccggaaggacgactcggttccagcatcacggatgcagggggcggggtgtagacggcacaggtcctgcgcatgctcagtgatcactcatcccggaagtcgggctctgtcatgtgtgtcaggactccagtcaacgatcctgaaggaccagcctatgttatattaagtactggtgggaaacacaaaaatagtacagccgagtgtccacctccttagtgatttacatatctatgggggtagcagacgttaaaaggtcagagcaatggctttggttggaaaatagtggattcaattcctgatgtcatgtattagttgtgttgcaaattgctaaatcccactgagcttcattttctgcattttccacagggaaataataatgtctatcttttgatgttgttgtgagattggagatagtgtaggtaaagtgccagtatccagggtcaatatggaagtgatcaatggaaaatatggaacagagggagaaagttaaaaattcatggttgtgtgtgcgtacaatgtcatatgcgcactcaaactgatctgatagaagatattggaactggatagataaaacaaagggggtttattaggttttgaaaagaatagaatataaactatagaataagaatacaaaaaaacattccatcattcattcattcaaaaaatatccactgagcatctactgtgtaccaggtattcttggaggtgctttgagtgcatctatgaatgaagcaaatattcctgccctctttgggtttagattctcaagggaagagtggacagacaatcaatggtaaatgaaataagtaaataatctttttttttttttttttagatggagtctcgcactgtcacccgggctggagtgcaatggcgcaatctcggctcactgcaacctctgcctcccgggttcatgcgattctcctgcctcagcctcctgagtagctgggattacaggtgcacaccaccacacccagctaattttttgtatttttagtagagacaggctttcactatgttggccagactggtctcgaactcctgacctcaggtgatccgcccgcctcggcctcccaaagtgccggaattacaggcgtgagccaccatgcctggcctgtatattttaaggtaagtggttaggtagaaaaatataacagaaatggattaaagaattgggagtttcaggaccagggcaggttgcaatattaacagggtatttgaggttggtgtcatttataagctgatgttagagcaaatatgtgaaggagatgaggaaatgagtcgggggacatctggggaaagaaagtccacctgaggaagcagccagggcagaagccctcaggccatgctatcctgctcagtgtgcagcaaggtcagcagtgcggctgcagctaagtgagtcaggggagattagtgggagttaaggaagcaagataacaggacaccagaaaaggagacttataggtcaccataagaacacagacttttactctgacagtcactggagggttttgcccagaagagtgaaagaatttaatgtacacttgaaaagactcatggattagtttgctgctatgttgaaactagatttgaatgggtgtgagcaaatgcagttgttgggaaaacagtatggaaactgttgtatgaaaatgatgggaggtctgacccagatctgtggcccaggccagggtggtagcagtgaaccattgggagatagtcagtttctagatgtatttccaaggtagagagacacatgacttccaaaagtactgcaatttgagtattagagacagggagggggcagcagatctgactacaagccttcacacctggacaactggaggatggacttgccatcagctgagacagacgatgaaagctgtgttggggagttcaggtcaggccttcagctttaaggacatcgcacttggtgtgtctgttagacacaggtagagttgagagtaggcgattgcatatacactcctgtgactcaggaatgtaccagacacatgcattgggaagttgtgatacggatgctatttaaagccacgaggccaaatcagatttcccccaaggaagtgaatgggaaaaggaaaaacgcctaaggattgaatccttaagaattccaatattaaggattaggtgagcaaatgaggacacagagcaggacactgtacaggaaaatccctcaggaggcaaaccaagagcatgttctcctggaagccatgtgaggaaggcacatcatggaaggtggagtgatcgatcaactgtgtcacacgctgccgatggaccaagtaagaggaggtctgaggatcgaccatgagatttgaaaacagggagctcagtggcaaccttgagtccattttcagatgtgacagcaaaagaaaacttaaggaagaatctgaagagatggataggacattaacattgaaaactttcatgagttttttctttctacagaggggagcaaaaactgacacctgtccaaaaaaaagaggtatattttaaagaagtgaaatgacctaaaaatgaagaatgtgtttatgtgttgatgggaatgacccccagaagaggatgtgaaactgaacaaagccgtgtcttccatcctacattagagggtgtgggatctggtgctggctcactggaggacctggagcgggaccctggaagtgctcttctgaacagttttatttttctcagtgaaggaggaagtgaggccatcgggcaaatctgagaatgatggagggaatgtcagaggtggaggatgacagaaggtgtgaaatgaaaatgttcatcttgaggagtgagatggtgaatgaactagtgggaaagtatggtcttccagcagtacaagacccacttgaggttttcagtgattagtttaaactgagctaattcaatttatggtcagttaaatagatttagtacacatttttaagacattttataggtcatgcactgttcttggctctggagacataaaaatgactaggatgttgttcctctcctcaaagtcctgcagggagagagactgaaatatgaaaccaatagctataataaattgtaataattctataattgagttatacttattgtttggggaagtactgccaagtgttgttgccaaatatagtgacacagcaagatgatggtgtttttcacatcagaatcagaatgtggttctccatagtgacctcccatttcctcaataaacatttattaaatgttcagcactgtgtgctaggtgttagagctacaacggcaaataagatcatttttgcactcaaagagctcaccatcaaatacagtgatttccaaccttggcagcacacaagaatcacttgggcaattttaaaaatcctgatgcccaggccataccccaaactaataagtcacatttttttttaacattccccagtatttccaatgtacagtcaaggacgagaattgctgatctagggtgagagacagataagaaaacagaaaatggaaatataggtgtgataactgctatcagatagggaggcacaagctactaagggagccctattgaggggtcagtcctgaaggtagaggggccttgatgacttccacgaggaagagccccctgagctgagtgaagggtgactggggtcagcgtgggaagtagaggagggatggggattacagctgaaggagcaggagcggcagaggcctggggactgaaagagcgtgtcccactcagaaatctgtgattcagtagagttaagccagggccacaaagcaggaagaaagtggcaagagatgcccaacagccattaggcaggagccacactagaatgggcgaattcaaatttgtttccccactactgtcaaattcctattcaaatacgaccagagaaacgtatggatcatacaaaaccggttaccccaacttgcaccacatgagcgagcagcaccttgagagaacctcagtggagtcagaggttagaggagctcctttacagagctctaaaggctggagtgagccacaaggtggttttagggcagaagtttctgagcaggaactggtcagatcttgcaaaccattttaatcgctggaacagacggtggtcttttctttggaacatatgagtccatgagaaggtgttgttaagtcagtttttctcttgtcttatttggattataagggtctgaatgagctcctattaaaacattttgagtttacagtgtttgtgttgtgtgtcctggttccacagagtttatctgttgtgaatttcagcacagttttgcaagtcgtggtttccgtttcatttcttactgtattaagaaaatgtggtgtggtaaatagagcatcgagaggcagtagtctcccataaaatatggtgtccacaaatctgctgactcctgaaggtgacctaaaaatgaacattatctactaagcatgttcaacgcatccaggacaaaaaaatcttgaactgacctttttgaaaaagacattgcaagagaagtacattaattgagtatatcaaccactgagtatgaaaatccaaaatgttttaggcaaacaccattaaatttactatctaaatttctaatatgagggcaagcaaagtggctcatgcctataatcccagcattttgggaggctgtggctggcagatcacttgaggtcaggagttcaagaccagcctggccaacatggtgaaacctcatttctactaaaaatacaaaatttagtcgggcgtggtgccgcatgcctgtaatcccagctactcaggagactgaagcaggagaatcacttgaacccaggaagcaggggttacagtgagccaagaggtaccactgcactccagcctgggtgataaagcaagactttgtctcaaaaaataaataaataaataaataaatataaaatgaaaagcaaaatttctcatatgaatattccaaacatataggaaaatatgatgaataataaaaaagttgctagctaccaattttcctcatgttgtaatatttttgccaaatttatttcacacattattactagagaaacacaacattaatctaaactgaatccacttgtttattcttctctaaatccattttccctgctcctgtctcccctctccagaggtccccaaaattatgaagttatcagatttttcttctctagtacattcatatgtgtttaaataaactataatattgttctccatgattttgaactactataaatggtctcagtctggttagattcttcagttacttgccttgtttatgtaacttcatgtttctgagatttgatttattcctcttaaatagacagatagaccacccattcattttaatccaatttatgactattaccactgtttagctctccattattgcaagacctgtgggctgtctccacctgtaaaaacaatgctgcaataaacatgcatgtatgcagcttgtgcacatgtgagcgggaattactcagggtaggataaaagcaccttcaacatttctaaatattgccaaactgcttaataaaatggttttgccagtttaaaatctcactagactgcatgcgaataggcaattttctgggtatataatgatatcttattgttgttttaatttgtattttcctgattgctagtgtggttgaacatctttttatatatttattagccatttcattttcctcttagtgaattgcctagttttcctaccaagttcttttttcttgtttctcttattggttggttgggattttattctcttttttttcacattttcgatatgaattcttttttacatgcattgcagttgcaaattttttctcccagcctgtgtctcttgtttacactttatgatgtcttcttttttttgtagagaactatttttcttttaataaactaaaactttattttctttgatgagtttgtggatgtgtgtgtgcgtttgtgttggcataaaaaataatttcctacccgaaaaacataaaaatacctgcttatatttgtattctaataatggcaaagtgttgctgttggtatttagctttttaatctatctgcaattgatgtttgtgtgtgatgtgagacaggggccttgggagcatttgttgattacaggaatctgcaatgttgtttctttccttaatccagtttccatttggtgtggttctgtattcggacttttatcggcttctgttggttcatttgtctttctggggcccattccacactaccttaattcctgtagctctgaaatgcattttgctatctggtaggatgagtccccccatcctactcttcaagttcatcttaattattcgtgatactttgttcatcgctctaaaattaacttctagtaccacacaacattctcttgatattgtcactgaagttgtattaaataaaacttatagaatatttttgtatgaattgacatatttatgatgttgtgtttctctgcccatgaacatgttatatgctttcatttatctaggtttcactttttttggttttcaatagagttttgtaatttttgctggaaatctcttatacatgttttatacagtcggttattctcacaaactctatttttgttgttattatagtgtctcttttaattaatctttgtttttgtacagttcacattttaaaatttcattgatatttctatattcatcttatattcagcaacttttctaaactcacatattaattctaattaatcattagattcacttggatttcctacatagataatcatatcattaggcagtttgttgttttcttttctaatccttattatcttcatttctttgtcctgtctcactatgctgactctgacctccaactcactgctgaatgaagcagtgcaaataagcatccttgctttgtttctgactttaaagtgattgcctctaatattttgactattaaataggaaatttgccatatacttttggtgaatgccctttttgaagttaaggaatcccctttagattcatggttttctttgaatttccatcatgaatttatcatattttattaaatagttgttctgtattctttgaaataaaaaacagtgatttttttcctcaaagttgattacacatttaaggaattcagtgaataaatctactaattacatccagaacctggctcaaggagaatacctcagacaaaaataaatggaggttgggggagcttgtgtttgtattctggaatggggttggagaagagctcctgactgaaatggaaatctgttccttcaataccagcactctacattgttgcttctcagcgtatagtagagcagcagcagcagcctccacagggtgcccagaaatgcagagtctcaggccctcccccagccctactaaaccagaatctacatttaaccagagagccgggggaacaatatgcataagcaagtttgaaaagctggtttacattgtccttcaaataccagaggcgaatccattcacattatctagtatatctaattcatctctggaacgtaaaccaactttgcactcctgagataaaattcctgtcattaaaaaaaaaatacattcctggattttttttaaaatatcttttcttgctctctaaaaccactgtaatattttaaaaaaataaaagaaaaaagacaaaaatatacctttgaacttaatttgctaatgtttacccgaggatttttccttccctatacataagaatgacctctaatttgcctctctggtattatcctcttctggttttgaatcaaggcagttctagataaataagtgatctgtggagcatttcctgtttttatcctctccgaaacattccatttagcttttgagttatctgtatcttgtattattgttaggactcacctataaattcttctgtgtctaattatggttgttaagtttttaaacttctgataacattttgttttaaacatcacatgtataatttgattttccgtgctttaattatttctttatatattttcttgttttcaaatttactagcaagcgtcattcctgttaattaaaagactctgctgaatttattactatataccaatttgttgtatccctattattgcttgtttataccttttctgtcttttttccttaacctatgttaagagaggcataagagttttgttgttctcttcagagagctacttctcaactttgtgaattctcttggatttttattggttttctaagtcagtagtttcttctcgtatttcaaattattcctttgttttatatattctttgggtttactctgttgatcttttctaatgactttagtagatgatcagctcattaatttttaatctttgtattttaaaaaatctccccttaaatactatactgttttaactctatcatgaacagtttaacagttaatattttattaatatctctttccaaatattttaaaattattgtttgtattttagatatgttaaatttgagtatgaatgaaatttgaattttaaatataactattgtatatgttattacttgctctgtagtctaaatagtacatattccatgtgtacttggaaatgtatgtattatttatagaaatctgtagtttctataagcaccagcaagcgtacatttcagaaataaggagctgaggctgggctgaggaggcaggattagcagtgtctctcaggttgggagctgagccctaggctcaacaacagaaatgcagttatttgaggaaaaaaataaaaagagtgaggtagaaaatcaggaagggaggggcaaggcatgggaatagagctggagcaatcaggaactggactgtttagcaaaacctgcagtgagaaaggtctagggtcttgttaaggctctggcttaaaagctataaagtaggaacttgatcatgatgtggtagctaaggttcctgcttctgtgactgcagatttaatttcaaatctgtatctttcatttagttgtagggactatggttatcttttctataaagtaggaataataattatatcccccatattgaggaatatgtagaaattaaatattgaggatatcatggaaattaactagtaaagtggtaagtattaagtgattactcaatagcaaactcaatgaattccactcttattatatatttaaattattttaattacataagtttcaattcttattaaataaattaaatttaattcttattaaattctaataagaatacctgtaattgagaagaagtagaagggaaggaggaggggaaaagatggtaaagcagggaatgagatgagaggaggtacagaaatagaccattgtacatctgtgcaaggataggtcctgctttcgggacctgtaggctgtggccaacctgcaggaggaggcaggaagctgtggctcatttcaggcagagcaaatgtgtaggaatcccacagttccttcaggaatagaaacccagcaatattcttccctcttctccccacttgttctggaattacaatcaggtaaaaaatcagtccaggtttgatgaaccatttcttacctctagtattgattccctagtcatgcctcagagctcagcagtagggaaataccaaaaaaaaataaaaataaaataaaaacaataacaaattgcagatggatggggagctctgttcacgctctgtgactggggaggaagacatgcatataaggaagtcctgctgcttcagtaccatccctcaatatcatcctcaactgtcaatacttcaaatattttaactgtatttccatccagttgacgagatttaaaattattttgaacaatgtattctgtttgtatgtctcattgagaccatcctggaggctggctaccacacatgggaaatgtccattatgtatttgtaacattttaaccagtaagagaaacagttgttctctttattctttattttattcttttataatgacgtttgctgagtatcatgtagacgtggtgtatcactaaatggaattttattaaggggttctaaagttcagatataaagttggtatgaaagaaaagatatactgaatatatacttttttcttcctctaataaaaattccctctcctccatacaggtctaacttgtgtattttcccttggttacagctaaacaatctaacagctgtagatgaagacatgatacctgcagtagccataactctccagttggagtttccttgatttttcttattagatagttgatcccgttttcttctcatctgataaggttaaactgcagccatttggaatgcttttcatctacatgaaagtcgccttcctgatgatgtggtaatatcaatggtaatatagcattcagctgcctgccaggctatggggaaggtcacaatggatattattacagagaactcatccctcccatgaaacattcatgctttatagcagcctccacttcactgcttcttgaagaggtccacttccctttgacctttgatgatggcattaaagtgcatgctcatttcaaaaatactattaataactaccatttagatagtctttatgttttacaaagagctttcacatctgtcatcgcccttggttctcattccaactctaggctgcagatgtcagattggccccaaatcgcacacctaggaaatatcagagccagaactaaaacccaaaccttctcctccaagtccctgatcttttaattacatcatagtgcaagtggagtttcaacactgtttttctcacaaaccagggagtgttatttgagccagtagcatattatattacttgtcaatgtttccagaaaagggtatcgtaaataattctttgccaagtggatgacttttcttacaaaaacaattttgctgcttagaaaatttgttttctgaactataaaataggtgtataatcatttctcctaataatgacgtgaggctaaatgaactcattaccgttaggatttttaagcttccctattttggcttatcaatggcatgtttcaagcaaagctcagtactataagaatgaaggatttagaggaagatagtgacgtagatcctgctcccaggaaagactgtaatttgagcacttgttcctaatgtgttttgggtcaagtagaactatattaggccatttttgcattgctgtaaagaaatacctgagactgggtaatttataaagaaaagaggtttgattggctcatgattctgcaggctgtctaagcatggcacccgtgtctgcttggcttctgggttagcctcaaagagcttttactcatgacagaaggtgaagtgggagcagacacgacagtggtgaaggcaagagcgagagagagagagggggaagtgccacacacttttaaaggaccaggtctttgaaaaactcactatcacaaggacagcagcaagccatgagggatccgcccccatgatccacacacacccaaccaggccccatctccagcactggggattacaactcaatgtgagattcgagcagggccaaatatcccaactatatcaagaactctggaatcttttgaggacattgacccttcctggaaaagtctccactgacaaaaattattgtgcaacatttcagagccctttatgggttagctaatgttcatctctggttgccggttaagacctgagaatacatggacacaggaaggggaacatcacacaccggggactgttgtggggtggggggcggggggagggatagcattaggagatatacctaatgctaaatgacgagttaatgggtgcagcacaccaacatggcacatgtatacatatgtaacaaacctgcactttgtgtacatgtaccctaaaacttaaagtataataataataataataataataataataagacctcagatctagaggcacgtaatttgcactcaggttgctaagtgtaggttgcggtgaccatcaacagtaacctaatgcccagaattagctttaattgcttgctaatattagtgtagatgtaaacacttaattagtgtaaatacaaatcattccattgacaggtaaaatgcaccttaacttccacagttgcagctttgggtgtttgggttagcaaactgatgtaaagaattgccacacaattaataacaaacgaggatattcacttagggcattcattaggttaaatttgcatacttgaagctattagaagacattagcccattgtaaccaggagaaaaataaagctagcactatctctttgccttccccacttcacttggctccaagcttagccactctgatgatacagtgctaagaagtcacacttttctccttataaatgactcttggcccctgcagaatacacatgtctactagggagacacagagctgggaggctttcgggagactgggggtcgatttcctttccttaaaatgaaagtttgacttgtccttccaaaaataaggtctttgtcttccatttgcttaaagaaaactgagaaacaaaaaagggattagctgaatttcctttgggtaggtagcggctgctgatcagaagggtctaatgaggtgagcagcagcaatcaatgttcaaagggaggtgacgacaaggtcaccaggtcaggcggtgccatcggatttggctgcgattgtctcgtcgataaatgtcctggcaggaaattactataaacaaactgcagcatctttttaattcaggtgtgggctgaggcgagggcactgacccataggatttcttgaggagaagaagaggcagcaggttatttctcagatttctttcaacagacaaatctatggagctgagctgtgtgtacagagatgtcctgttttcccacctatcttgtctcgtctttgcagaacatcattcctaccactgccgtgttgatgctgctagtggctgagcttgggccctcctgagtgtccacaccaaagctgagttgagacttgctttagtccatggggaaccaaaatttgtcatggtcagctagctcttcatgtctaaaggagagtattatgagttcaggtcatatataattattggggtcaaatggatctaaataagttattaactaaaagtatgaagtatagtgggggttccagtatccaaaatctttggtatcatagagcagtagcatccttagaatcatagagctgttgaatactgggcaaggaaggaggcttgggagggtgtacagtccagcaccggcatttcaggtataaagctgaaactccaagtcattaaatgattccctgctcataagtcagccctcccgctaatagaaaaaaatattttaatatttttgttgtatggctaacattttcattcaccatggatttttatcccttaataaatctaaggcatgacatttcacattctggctggtctataacatcacatgccctggtgagaatggcgtgtgtgtgtgtgtgtgtgtgtgtgtgtgtgtgtgtggccaagtggaggtggactcaggggaagccttgccttgtctgcaaagcttctcctagccctttgcagagggcttggcatctttcttctgtgccactgatttttatacaaatgccattgcagcacctttgaggacattctgtcattctgtcctaccaggtagtgaactgcttgagggtaggaaccataaattagcaattaaaaataactgccaaatgatggaccaaagcatggcccatagattatctaacactttagtaaaataggaggcagagaaaatgacacaagatagagaagaaggagaaaaaagcaaggaggaggaaaaagttgtcattttcataaagagttctgaagaagcttttggtcactttgcatttaatcccctaaatcaatttgcctgcctggaacccgggtctggggtgcttgccatgttgaggatgagctggcttcatttccagctactggactcgcagatagaattgtccttgatgttccgaatagagagaaaggcagagactgacagagcgggagtgtggggaaggctcctgcagggacagagtgttctaacctgctgaggcggctcccatggagccatgagctgcgtgcaaatggcagtcagtgtgtgctttgaagcctccagccttgggaacttcaaacaaggggaggacagacagatgatctatgggaaattaacatctaaaaggtctaaaatctgttcttcctgtcaccttaatctcctgcctgctcactgacagtatttactttctgaacatagtgaacatttaatacaacagaggctcccacacacttaacttttctaaaacagaaaatcttacatttcaatacaatccattttaattattttatttcttcactgcattttgaactgttcctttctctaggttttagaagatttccttaaggagtagagtaaatgaactttgagagaagaggtaggctagcaggtggaatgtcctgccactgctctggcagctccatggtcacctggcagatgctcatggaatcatgtggagtaacagtgcctgctgggtcaggggcatgttttctgcctcttaccttttgatttattttgattcctggaatagatcagctcactttgaagtatacctaggaaggatatataatttgtctatacccacccaccgatggatttatccattcactcatccatccaactattcatctactcatccatccacccatctaaccacccattcatccactcatcaattcatcttctattcacccacccatccatccacccatccatctatccatccatccacccatccgtccatccatccatccacccacccatccatccatccatccacccacccatccatccatccacccacccattcatccactcatccatccacccatttattcacccacgcatccatccacctaccacccatccatttattctcccacgcacccatccacccatccatccatgcatccattcactcactatttgtgcattcaggaagagagtcaatctacaaacatctttagagtacctactgtatgcccagaactatactagatgctggcaataagagaagaataatttgtggctcttcctttaatgagaatatgttctacacagtctgagcaccataagcagactatttctttttttaaatttccaacttttaagttcatgggtacatatgcaggatgtgcaggtttgttacataggcaaacatgtgccatggtggtttgctgtgcagatcatcccatcacccaggtattaacccaagaatccattcgctattcttcctgatcctctccttcttcctccaccccaggcttggacaggcccagtgtgtgttgtttccccctgtgtgtcttatgttgtcataatctagctcccacttataagtgagagcatgcggtatttggttttatgttcctgcattagtttgctaacggcaatggcctccagctccgtccgtgtccctgcaaaagacatgatctcattcctttttgtgattgcatagtattccatggtataaatatactacgttttctttattcagtctatcattgatggatattaggttggttccatgtctttgctattgtgaatagtgctgcaataaacatacacttacatgtgtctttataagagaatgatttatattcctttaggtatatagccagtaatgggattgctggatcaagtgatatttctgcctctaggtctttgaggaatcaccagtctgtcttccacaatggctatactactctacactcccaccaacagtgtcaaagcattccttcttctccacaaccttgccagcatctgctgtttctttttgaatgagttatacactcctattttgaataacgacatatttatttttggcataattttctagaaagctagtaatacagattatacattagaaggtcctggagtagatgcatggttcatctgtagtagtttaggaaagcaagcccagacacattgcaacaattctacttactaccctcacaaagaaagcattggtatatttttacatctcataactgaagtcatcttagaataaggtgttttctagagtgttccatgggtaaaggccaagagggtttaatcctagatatgaagaggctctctgagctgtcttcatggtaatcgtggtcagataaggtacacagtgatttaaaaagacatacgagtttcttcctttagggagctaccagctgaatgaaaaggtacagcattaaacgacaccaaattgtttttaaaaaggaaaacttcttttgctcacaagcactgtatagacaataaagagatgtacaggatagctggggaattcgcatggtgtaaagtcaggtaaagtctttccgaggatgtgacatttcagttgaaatctgaaggaagagggaaaaccagcactgcaaaaagcagaaggaaatgtactctacaccaaggaagcatcaagtgctgagtcttgacatcagcatgagctcagtatgttggaaaatcaaacagaggtgaatgtgcttggagcccagtgtgggagggagagtagaggtaagttcgggagataggggaaaaattaggccacgataaggagtttggattttgttttaagagcaatgggaagactttgcaggttttgaaggagagtgaatatttaatttattgtacaaatgcagatacttttgaaattaaaaggggcactcttaatcattagacctggacacagggcataaactgggtgctgcaggtaacttgggatgtaggtttttcctggtttcaagtagtatggagacaaaacttctgtttctaaaagattgttcaaactgcttagcaaataatacataggagagtgagggtggaaatgcaggcaatatagaccaatgcaatgcacagatttgggaagggaggaatgaagatgcggatgtgtgggaccggtgctgatgggaacatctgggccctgtgtctgtgaggtgctgaaatgcagcagagtcccagtcctggacagggaacacaggtgatctggcaattctagatcatcagaatgaagaagcaccacttgcagcttagaaatagtaaatttagaacaatttaagcggaggactttttacccagcaggtagtacgtacaagaaacttgctactccaagacgtgattgagactcacaatctatcaaggttaaaagaaaacgaatggaatgagttgctaagggaaacttggttattttgggtatgtccataatgttttgatattaatttaaatgaaagtttaccacagcctctccataccacactcagaagcaatagaggactgaaaacctttgtggataactctgacaattttcacatcttaaattccccactctaccaacaagctcagatcttactcattccagcaaagaaaacaaaacagataacacacaaaaaaacaaagctttcttttgtttctgcctttccttaaactaccacatcattttcctttttcctgttattgccaaatctcttgaagtagctgtgtatgtacacttgatagccttcattttcttgccttctgttgctccttaaatcaatgccttttaactttcatcctaacaatgtgtttaaagaacagtcaaaattcttcagcacagtgaaaattccttaatatcaaatgcaattacattgctcttcggatccttctgtcttgtttgcagccctaggaggtctttaagctccctacacatcagagacccccacctccctgcatggattttgacttccttggggtaaggactgtgctggatcaatcctccatcctcaatagctagcttagtgtctgacacacgtcagatatttatgaaatattgtggacttggatttggtttaaaatggcctaccctgttctctgccagatccccacgcctgaagatggtgagtgtccaataaatgtttgttgaatacatgaaagaagaaactcctggactgattagacagtcgctgcgtatttattgatcccttctagggcacaatactgtgtttggagcactggtacttgctggggtgaataaagtgagaatcttacagccacggtcttagtttcctcatcatcctttctttcactctttagcagcttacaatgctaattttttccacatctcactgctactgcagaaactccatctctaagagtatggaaatgtccttaaaaacatcatatataatgactttttcttagaccccaggaaaattatatattgcataattttataattaagagacagagatcatctaatctaagagtctccaaatttttcaacgaataatactcatttcttaatccccgtaacaccattttcaagaatatctcaccaaaattatattcagcaacaatttattttctccttcaaataaaggcatatacatatctgtcctcaaagccactgaccagcattcattcacaactgaatatttattgagttattatgaccccagtgctgtgctggatgccaaaaattaaatgatgaacaaagcagattcctttcttgatcttacgatctagttaatgggaaaaatccaagcttcccatactagtttatgtaataccagccaaaagaaaagaaatgtcttatttagattcaagcgccctttgaagatgtatgtattcttttatgcatgtgtttgaaaattttaaaatatgcctgactaccttggaggctgtactatactgtgggaatgtccagatgtgaagccattcacctggtctaatagcccattttacaggcaaggacgttaaggcccatccagaaagctttatcatagcttgctaaggatcacacatctaagcaatgataaaactggggctggcagccaggtatacatttgcaatcctgtactttttccttttttctcctttgataaaaaagcccttgatcctttttttacctttttatataatcttaaagtatctaagaagtttgttagccctagaacctgtttaacttggtttaatccagcattttccaaatgtaacttacccactatcctctaatgtcactgggcagttgtcaccatctcctgggacacaggccttccacagaacagacacaggtcaacactgacccagatagtgaagttctaactcctttacttgtcgttgaagtctcctaaccccaatgttgccatctctgtcttccatgactctatgcatcctcttctaaaattatactatacccctgagctatttgattcccttccccgaatatgccttgccttccatggctgtgtcctttctcacatcatgtcttggcctgctgcagcgtccccttcctatcagcccatctcagttccagacatctctccagcttcccattcagtggccctcaatgagtccagctggaaatcatcatttctcctctccctcccatagtactcactggctgtacctttcatctggcagtgaaaatgcattactccttgctgctagttctctttgcgtgttcacacgtcttttcctggggataggaaccttgtctttttctttgtaactcccacaggacaagcagtcaggaaaaacgagaaatttgaaagctagtcaggatttctccttctccctcaccctcactaaatgacaccgcagatttgtacatctttcctatctccattgctaaagccttaatcctggcctattatttcttgtttagtctatgttattgtctcctaacttgtctccttatctcctggctcacccacctccaatcatcctccctgcaccctcctgctagatgacctttctaaactagaaatctgatcaagttattccaatgacatctcatcatttgcaggattgagcttcgtctccttcaggtaacataaaagaccctttattgtctggttcctgacagctctccccctttctctgtctcccccaatttccttcatacccctctctctgcctactccatctcttccagcctccgccccgcccatgcctcacccttcctttccagtctacattttatcatactgagctcttatgaggttctggaatacataagttgttttgtgatttctgtacatgctattgtgtttgcttgaaatgctaacccttgccttcctacacactctcttttcttcatgctatactttttcatttcttttcattggctctgcttctgttagttactttgcggaagcttctatgaataggccaggatgagcaagttgattctctccctctctccctctctctttccatttctccttacccgcccccacccatgcacatattattagacacattgctttgcaattattgaaatatttatctgtttccccagttgggctaagagcagaggggaatgctgtttggacaatccttgtatctccgtcttctactaaagaatctggccaatgtgaggagctcagtattttttgagtaaatcaacacatgtataaattgtcaccattcgtagaacccaggaggttttccgcacgctggtgggctaagtgaatataaaatcggatggtaagttaagtgagaagagccctgcaaatgaggcaatagcagccgcaggtgctttgttctcacctaagcggacaccgagctcactggctttgctgaagcagctctgcagcacgttgagccgcagcagctggaattgctctcgtctgaatcctcccttctggaatagggaacgagggagtgaaagactagcacataatctgtggggcttaatctttctttgcaaatccccaaatactgtgaaattggcaataatccaggcaactccaaacttctgctcaccaaatagtccccaccctgcttctacagagggcagctcaggtgttttaaatgcggaagtagctagtagagagcaacttcactcctgtaacctaattcattctcagcctggaaaatggaacgtaaacatcacaacctcagccagtcagagttttgccgcacttcagctcctaggaaatcatttcaattcctcaaagtctattttccccttcaacatccatccatccatccatccgtccatccatgtgtgcatccgtctgtccgtctgtccgtccattcatccgagagacacatcgggtgtcttcctggtgccaggtatgtttcagagaatatggttatgtttatagagttcacaatttagtaaatattttgtgtcatctaagagtgctctaaaaatctataatcctgaccagtagaaaaaataaaacttttgaaaattaaggtttcaagaaagctcttatttcttaaaactgtatagaggactgaaaatctggagctaataaagaccttggtacggttgactttcccgtatgtgctactgggaatccaggtgtctcaagggacaattaagagtatgactgcctcttgtccctttcgagtagtcctttgagggttgttttatctttctcccattttaaccatattttacaagtctaacaagacttgagagggtgatgctctgagacttcacttgtgttcttgagacacatactcgagtgggatcttggttccattactttccagttctgtgacttggctactttctataaccgctctttcccttggtttcctcatctggaaaataggaataataataacactcattctctagtgcatcccatggtgaatgctagctgaaatcaacatatgtaaaaggctttgcaaatgcctggtttaacggaagtgctctacaaacagtattgaagaggatgatgtcgattatgatagtaaaaatagattctgagacactttgtatttccattttagaagtgcctccccttttttttttctccttttctctttctgagactattaaaggttgttcttatcagtaagggcagcttttccccttttctcacttcctccccactccccctttgtctggaggttccttggcagaaaggaacatgtgtttcttatatgtgagtaactctgatatctattagagtctgctgagtgcagagagcttagtcactcctgggggatgatgcgtctatatcgggcctcagctcctatctacagcctccgtcaatgtcaaaaagatttcagggcaggtgtgaggtttagaattgagggaaggacaagagctagtgagacagccttcactgagagagggactgacggggcccccatgaccatctcgtgtttggagggtctctggaagggctcctgagactcagcacacagtgctgctcatggctgggctttattcctgtgccatggtgaggacacagggctggatcataaggggtcaaggcacaggcagagtctgaaggaacccatgtgagactttcttatgctctttccgtcccaagagggtcccacagagcccactgtccctccacaaaaatgcagcaaaacatgtgggatgtttctgcccagggaagcccagtagagactcagagtctaaggtcttaactggacgctggtcatatcgtcaccctctccctagcacttactaacataccagattcccagaaggaaaatacgtattcagcataaaccacattgcttgcacggataatctaggcacaaggagccacgcttactagttaacgaacagtggaaaccttcctgaaatccaagttttctggtgccagccaaggaccaaccatgcaagcaggcctttctaagggcagcaggtcccaggaagtacactttcaccaccccctgaattcttagctacatttccttggtagaggtgatggtggggctacatcatctttctgatttgcacaaccttcatggacacacgtttatctccctgtctcttgctggctacatacttatgaaaaaggcctggctgccagaggcatgataatgccaaagacactgatgtccacaactgggcacctccttgtgagctggcatcacttagaatcgagcctgatttgccaggggcttttgcaccctgtcggttggcctccacttcccttagggtgtaatcttagtcccctaggatttcttcagccctacccctggctttctggctttcccatgggtatcctgttactgagagctgagcatgaaggggacagtggagtcagaaaaaatatccctgtcagctgccaaaagaagacatcattttccattgcatgtgagctctattatgaagagctaggaagggcctacacatcaacaccaaaatattaataaaaagaaggctgtacggtcctatccccaagtgctaaaaagactttagaccaatgtgacctgtggtataattgcacaatttcaagcagcctttctaaattaaaacgtaatcccccagcagtgaggggcttgggtggcccctccccctccctgggattcatttctctcttccaggcccatctctttcctgccgtaaatctctttccttctgtctctctgtctgttcatccttctatgtcctctatctagcttttcctttcttgataaaaattaaggaaaaacaacttgatagattttccgataaccttctagaaagtctcaccgggttacattttgctttaatagcatttaagccaatctgcctgatgttgctgtaaaggtcaattaaattcaccctaaaaatttcactcctggctcattatacaattggaaaatgaattagaagcacatgctgcccctgaggtttctgatatttcactaatgaatatgtcttaaaatgcaaaaagaaaaaaaaagagagagagaaaagaaaaaaaggtgttgtaggccacacagcagcttgcagtgctaccagctggtgcagaacattgtcataggcagtggtctgagactagtgaacactaggtaggcctgtctccactccacattcagaggtgttcacaggtcccaaatgcacgtgggtctggtcagctcttcaccactcctctgcacatccagagcccactgttaaaccccaggggaggcatccagctcacctgactcttcgttggctgctcttagtgcggtctcaaggaccacagttcagtttaatatcagcctgagcaaaatgtgattctgaaggtaaatctacaaggatctttgtgggcagagcacgtgtgttgcaaagccaggtctcagttgatctggggattctcagactgtctgagaattttagcattgtaactgtctgaggagagaacagccctgtggaggagggaacatgtatttctgggtcactctgagggcacaactggggccaagagtacagagaacacaaagtcaagtttgagcccgacttaaagaagtaattttaactgactttctccccaactcctgacaaaagaaagccatcagacaagatagcaacttcctggtccctgaggaaggcttcaacagaactgagcaaccctatcccaggagtccatgtttcaggtggaagtctccttaattcattcactcatttcttcattctgcatatttattgctgtgtcctagacagtactaatcttgagaatgaacacaattgcctagttgttatgtatgaatcgagggttgttttttatttttgtttgatggtaaggttatattttaaaagaatataccatatctaagtccctagtttcaaaaactgtcctaaaattcagatttttgctcacattggagttgtaaaggactttcatgttcctcttatagcaaaggctgtgacttttctgctttcatgaaactgcaaactggtatttattttaggacaagatggctccaaacctcgaaatatgagttattggatgtctgtcttcaggtttaagtataaacctagctgaattgactaaaacatatagagacaatctctcaagcctttcagagcggagagaggaagtctggttgctatcctccatgcctcacagatgttcctataggattttaggattccagactagaagtgacattgaggtcatctcactgaagcttatcctgtctaaaacgaggaagctgaggaggcttcccttgggtagtacaagaacaagacattcttcagccagggtctctagactcaagagcagtgttctttcatggtaccatattgacttcctccatttgcaaaattgtgctactcacatgtatggtgttttggaaggtggaaccaaaatttctaggaagagtgagattgcaaaccatcatcatgtgtgttgagagtggccaatcaggcagtgaagaaagggggaactggtgaagccctgggcatttcacctcagggctgctgtctctggcaccctgatggtgctcctcaaagcctgcttctgaaagatttcatccaggtgttgttgatgtttcccattccatttcctggtgtctccatgtcctttttctttattgcaaacctggtgtcagcagatgttcttggggtcctcctgactccactgtgcagcaggctgagtgcagtcagactgtcattgagaagtactgtaacctgggtccaggaagcgatgctccaagtcactcagccactcctcagcatcactgacactcagcattctaaccttggaactgcagaaatatagtcgaatgcaaaggccatgagctagagattcatgtttgaatgaggaaggggatttccctttccttctttctaaactgaacctgcaaaccataacatggaaagctgaatactgtcctgtctgacgtccacaagagcgggatatggagaaacatgagcacagactcaggtccctccctcctcccatctgccttctcttccctaaaaatcttccacaggttcaggatgtcctgctgccaatcaaacatgagctcccatgccacatggctggggaggaccagccagcgcttgtaggcctggcaaaattgaggatgcattttgatttactcacatttaaatatcagagctagttttgatgacatactatgtaactgaacataatcaagtttcagataaaccagagcaggccccaaaagtgcacctgatgaatttccttgtagaaatggagtgttggcagaataagaaatggaatgcatggagtgcccagcataagaagtcgggggtcagggaggaaaggagggaaggaaggaagagaagtgagaggcagggagttagatcagtcaatcacacaattaccctgaagacaagaaatagaaggactatctaatttaggatgttatatatcctcttgaaatgtaaagatttagacaagaaaaggggcaggggagaaaagcaatccaacgaaagacgaaacaaatccatcagggcaggatccatcaggaaggaaagagtgtggagcgactcctttgcttaatgcgggcttctggtcagtccctggagcttgtcatgtgacagcaggattctcctgctgctggagagcctaataggcaggattggtccaggaactcctcccgctggactgactggtttcaattaagactatcacaaaggctaattatcattttaaacctgactctcaggctcactctccctcttgctgtaaatggattgcttaatggtcccagtgcaaggctctgaaaccctggaggtttcctattatttctttgcctccagcagggaccagggacttctagagtgttaggtttcaagggagaataagagtagcaataccctctttctttttcacagaaacaaagactgttagcattgagggaatgttcgattttggttttgatatagtcggaccttctactgcatgaaagagtttccctatgtgccacctctgaccaggatttcctggcattgtttgaacacaactggtgagagggagcttgttacctcctggtccattttggacagttctcatattcagaatgtctctcctaatgttgagctgatatctgccctttttaatgtccatgattctttcccagttctgccctgtaatgtttctgggcttagacaactgacagtcgactgagccagcagggcctgagcttgggaaagaggaaagcttggcaacctctcccgcaccggcccagtgggtctcccacctccagcaccattctgtgtgggtgttccatgttctggaacctgcctcaagttgcccagtctttgttagatgagcacatgcttcattttctgggctgtatcatgcgctctaccctgagacaatgtacaagtccccaaaggcaggtattagtatccccatttacagataagaatgctgaggcttagaaagatcgagtagcctacccctgatcacatggctgacaaatggcaaaagccaacactcaagccccttctgttggatcccaaagcctgttttactatgtcacaccaagacaaaattcagagtatacagtttgccaggtaacaatgtgcttgtgagcataatataaatcaatgtgtgaagttgggagtgtccagaagacccctgaatgtgttgtatttatatgaactatgtgattggttaccaccggagctattccaaaggcaatcactgtattgtgctcacccagcctaacaattcccttgtgctctgcacttgatagctggtttaaaaatcaaaacccaaaacaagcaaacagaacaatgctagcagattcttagtacagttgcatgcacgtgcttagcctggcctagtggggcaggctccctgccctcacaccctgctcaaccctcttatgctcacaggtgcacacacacaggtacacactacacacacactcacatacacaccaaaaacacagacaccccacacactgacacaccccacctgctctcacacgttgcacacacacaagctacacacacatgctacatacacacatgctacacacacacctcccacactcacacatgctacatacacacatgctacacacacacctcccacactcacacatgctacatacacacatgctacacacacacctcccacattcacacatgctacatacacacatgctacacacacacctcccacactcacacatgctacatacacacatgctacacatacacctcccacacactctcacacatgctacatacacacatgccacactctcacacatgctacatacacacatgctacacacacactacacacacaccccacacactctcacacatgctacatgcacacacacacacatgctgcacacacatgcctcacatacacatgcatgccgcacacacacggtgcacacacacagcacacacaccacatgctgttcacaccctcatgctgcacacacacatgcatgcgttggcaggtgcttccttttcacccttctttttccattcagccttgtcccaaatttacatgggaataaataaaaaacaaagcaaagattgcctgtgggggtggggctgtccccctcaatggcatctgcaggttgctggctgtgttttgcagcccgaggcctatttctcagtcccagctccttggggccagaagcctggaacaaacccaagggcaggccttaggcacggggacctgccctgactcctccgtagggccaggttggccatgccttcagagctccaaatcccaaaggaatgagtatgcaaaactaagacccacctcacattaatttagtgggtgaactgtgtgtctccccctcccctgcaaatctatatggactaaaaatacctgcgccctccatggcgcccaagactgctgacaaaggaatttgcatttgcagtcagaaacaccctcggattatttttgaaatcacctcccttacattttaaacaggttggtggattcatcatttaggctgccaccaggaggcagctattaagagatgtgactgggaatggcatttttcttaaaaaaaagtggcgatttcactacaatgtcgtgattttttttggcttaaaaataaaatctgtttgaacctaggattctttagacaaactgatatcttcagggaaagtagattaataggaaatgtttttggaggaaccaggtgtcttcccagttcccgtggaatgacagcaaggacagtgcgcggcagccaagatggagaacagggaggaggtgggggaagggggcactccctttccttctgggcctcttggactaggggaggggaggacagggtgcaatcgcaggatcaattagcagcccaaaagtaaattagccaggaaattagcttttcaggtgtccaactgtgtgtcttctcaaagactgcagtcctacccatctgctatttacgctttgtgcagggctcgggaaagaatgtggtcccacttacacatccagcctgccagagagcaggtctcagggatgcctaaacgcagtggggaagttggaaggatccgcaaaggctggagtggagaggttgcagcaaggaggaaaacgctgtgtgcgtgcggatggagaggtctgcctgtatgtttgtctgtgtgtctgggggtgtgtgtgtgaccgtgtgtgtctgtatgtgtgtttacgtctgtgtgtatcagtgtgaataaccatatgtgtatgtgtgtgtgtgtctgtgtgtgtctgagtgtgtgtctacctgtttatctgtgagcgtgtgtacacgtgtgtattgtgtaagtgtatctgtgtgtgtgcgtgtttgggtgtctgtgtgtgtctgcctgtgtgtatgtgtgtgtacacatacctgtgtgtgtatgtatgcatgtgtgtgtctgtgtttatgtctgtgtatctgtatgtataaccatgtgtgcatttcttcatatgtatgtctgtgtgtctgtaggagtctaggtctgggtgtctgtgtgtgtaaatgtgtctgtgtgtatgtatatgcctgtgtgtatgatgcgggcatgagatttgcagagagggtgttggggcacaaaatgaggacttggtttacacacaagcacaggccacggaaccccaccaccagcagatggagctgaaggtacagttttgcgggaggccaggctgaactgccagctgttttggtttgctggagacctcagaaagaatgaccatgttgagtggaagagctatctgcatggagagagaggaaaccccaaacacaccctggagtcttgcttcttcactacgaagccagtattgttttgacttgctgattgaattgcaggtggaaactaaatacatcgtaccttgctttatttcagtgtgtgattgggagataagggtccccctgtagccagtttagaattagaattttaaagtctggataaaccttaaagaatccaaggcatccttttgctttacagatgagaaaaaaaggagctgaattctctggcgtttttgtttcctcgccctcactctgtccaagccccgcagccacccacccttttttgtcccagtctttcgtatcaaaacctccctcctacctctttttccttcctgtccagtacagtctttgatcacctcccacctgagctcattcaatggtctcctaactggcctccctgcctgtgggctttccgcactccggccctctccacaccaccacaaggttaaccttccagcccagctctgattgtgtcgggctctgtgcagacccttcagtgggccgccactgccagcagctgcagaatcaaacccggctgtagcctggctccaatctggaaatgacacacctttccagcctcacactgggtcacctcttttgccctccctcttcgagagccaaactgagtttcttgcgatgtccgtgcacaccctgagctctgtgtcactctacctttgttattgttttctttttcaatttgtcctcgtcgtattttatttccaaatgactcctcaaatctccccttcacatgctaccttccctataaggctgtcctgatgacatcagcaagaaagatctatttcctgctctgatctctccaggcacttcctcttgacccctctgctgtaacctgggcctttcactgtgattatctgtattcacatcccatccctctgtcttgaagagactcaccactttgttttcccactactgttgcatataggaactcaataaagttttgtgggcaaatgaatacaagtatttgaccttacatacatttttcccagctcagcctgcatttgacgtggtttatggtggtttcctcagctcagtctttcccactgacagacagcatgaccacgtgcaatcaccccccagccccccgcaatgtgccttcagtatcctcaactctcaattgagaacatgagtaaaaattagtagatttcactttttttaatgtgtgtgctatcccctagcgtcaggcaagtttatctcccgggccctctcccttccttgatgactggaagagggaacaggcgcaaactcatagctgcttctccccgcctacgcgctatgacttgttggaaaaccattgtttcagaggaggagtcctttccggccctgccagtcattgtgtgatttacaacaactccttctacctttcgtagcttgaagacttccccactctccttcggggtagatgtggaagcaatataagagtgaagaagttctactgtctccggcatctgttaacatttcactggcttcccgagaaattggctcatcctgtccttgctcatcttttgtcccaagtaaaatttaaaattatttcagatggcttagtcgatgccagcttgtagccttccaactgctatttctaaaaatttatgctctcattttattttattcttaggaggatgatagacttttagaaacagaaggaaacttcagtgataattcagaaaatttaatttaattgtagatctcaggcccaggtgccactgtcccatgctttcttccttgtcccttgtccttcctcatctaagatagctcctggaattcccattgaaatggaagcaaatcttaaggttagagcctggcccatccagctctgaacagttactgctctgtgagcacggctctcactcacctttcctatgccttaaggacttcactgttggtacagctttaagtcagccgatatttactgatcacagaccatgtgctatgcaaaagtcatcttatttcattcacacctcagctgtacagagcagacgctaattttacaagatggaaaacagacacaggaagtttaagtaacttgatgaatggccctcaccttcaggaggtgaagctgggatagaagcctgggaattctggctcgagtctttgcttttatcgagtccattttcatgcactcttgtgaaggcaaaagcttaggggaaggaaaaatagttccatgctgaagtcacagtagaaagaaagtggatgggctttggatttagagacagctgaaatgaatcctggttttaccatttacttacatgatcttgggaaagctactttaattttcagagcagtggtttctttattaacaaaatgggataataatactattgcaaatgaaatagcacactaactgaagttgtatgtgtgcaatgcctagcaatggctcctggttgaatattgggtgctctctgaatgatggtctctttcctctgagtagaaagcttggcagcccttgtcccgcctgatgggtgccccagcctggtcatatgtctggagcttagcctagcctaaggttggattccaggctgtgagccagcgagggccctcctctttaagcagtgcccctttgtagctctgagcagcttctctcacccctccctaccttttctgaggttcaaggaattctattcccttgaatcttaagggggagaaagtgctgataaaaagacaacaacttgcaaaatttagaagccaattctcagagagaaaatgattgaaataaaacccttttagcacaggacacagcatttctcaatcagaaatgagcctaagaaataacccacatgtactacccaatacttaattttcaaaaaaagcttatcttcggtctccccacctcccctaaaatgcaacatatttgagatgaagactcaaatgcgtcttttaaaaaatagtcctatttcagacctgctatagtaggtgtagcagaaagaaggtggtaagattgggtctatttaaggacctgacctaacctaaatacagaatctacaagctgccatacagaaggaacaaatgtgagaaagctcatctgaaagcaccattacatttttatgagactgtagctgaatctattgtgagtttattatctgttgctgcacatgcaaaacactaccaagaaagagtttgtgtgatcatgtgagtgggtatgcttgtgttttaatcagggagaacatgaaaaccaacatacgttgtccctctgagtcttggcagctcagagttaaatttagtgctcagtggtgctcagtcgcccagcccaggtggtgctggatacatttctttccttgttcattttaactttgtgttcctattttcatttgtagctattctgcttcatatatattttaacatcacaagctgtctcagaccctttttccaagtaggtggaatataaatcatgagtaaataaataaagctactgaggcaatgagtgacttctgaggaagtggaggtatcacaggcaggcagacacagcatgactgaatgttattatagtgtggtttatactatgatgatacaactatagctattagcgatcaaacattgtttatgcattgttgcctcttctatgtttattaattgatttctataagcttacacaaatagtttatcaatatgaatactttgcatttatgggcttgttctctccctgttaatccaaggagatgcatggagagaggattgcacctgttagctgctcctctctccctcccctctagagactcatcatgctttgtggctcctgtaggccaccctgccctgggctccctggggaagtctttcttccttttctttctgcatttgccactgttggtcccctaggtctttcctttgtcatcaggtactgtgtcttctcttccttgtttccctgcagctcctgcagtttctccctatgaagaataaagagcttcagccaatttcagtcctaaaatttggaggaatgtgtcagtatcttcaagggatttccaagctcttcctgaagacatgctgtgtacacatgtcttcatgtacactcccttgccacattcaggagtttcatttattctttcatgctactggattgtgtgtcagtgcctctaagacatcttattaccaaatcattctccactgggtacaattccaccaaattccagccaccctcaatcaagagtaaagcagggtcacgcagatctggcacaaactattcacaaacaggtgaggaaacagaactcaggagcttgggccagcctttaattaaccttgagaaagtcctccctggagttttactatggctcagcagcaactggcttttgggtgggaagtggcagaatggttatgcacaaggagaaatagatattgacatactgaggaatacttagattcgtcgatttctcagtgtccttcgttcttgttgtttcatttgtcttgattccccaaaagggccagtggctgcctcacatattggcttgttcagccaggatctatgatcatgttttccacttcacaaaagccatcctgctcacattaccaaacagttacctatcattttctggctctctgtcaaattttggtaaattttgcagaagcccaaaggagttggtatatctctctgcatgtgtgcatgtatagttgaaagaatatgaatggtgtatttatgagtataaaatggaattgtagtattttaagagcccgtctaatttggtgattcatatttttatatcatttgatagtggctagattgaaagctggtaccattaagattttgttaaagaattatagtatcatactgtggggtaattagaccagatttataggggacaatgttgacacttaaaaccagcaagagaatgatttataatcctttatgcatatacccagtaatgagattgctgggtcaaatggtatttctgcttctagatccttgaggaatcactacactgtcttccacaatggttgaactcatttacactcccaccaacaatgtaaaaacgttcctatttctccacatcctctccagcacctgttgtgtcctgactttttaatgatcgccattctgaccggtgtgagacacatgcacatgtatgtttattgcagcaccatttacaatagcaaagacttggaaccaacccaaatgcccatcaatgatagactggataaagaaaatgtggcacatatacaccatggaatactatgcagccataaaaataatgagttcatgtccttttcaggaacatggatgaagctggaaaccatcattctcagcaaactaacacaggaacagaaaaccaaacaccgcatgttctcactcataagtgggagctgaacaatgagaacacatggacacagggtagggaacatcacacaccggggcctgttgggggatggggggcaaggggagatacagcgttaggagaaatacctaatgcatgtggggcttaaaacctagatgatgggttgatgggtgcagcaaatcaccagggcacatgtacagctatgtagcaaacctgcacgttctgcacatgtatcccagaacttaaagtgtgtgtgtgtgtgtgtatatatatacatatatatataccgtatatatatacatatatatataccgtatatatatacatatatatataccgtatatatatacatatatatatacacatatatatatacacacatatatatacacatatatatatacacacatatatatacacacatatatatatatacacacacacacttttaatgtatatatatcagctgatacatatatatcagaatggcgatcattaaaaagtcaggaaacaacaggtgctatctctccccttgcccccatcccccaacaggccccagtgtgtgatattccccaccctgtgtccatgtgttctcattgttcagctcccacttatgagtgagaacatgcagtgtttggttttctgctcctgtgttagtttgctgagaatgatggtttccagcttttatatatatattatatattatatattatatatattatatttacatataatatatttatataatataatataatatatatatatatatatatatatatatatatatatatcagcaacagggtgttagtcccaagccttgatggttgcttcaatgtgaaaagaaaataaaaataaaggccttcttggtctcacctgggctcccacagttcaaggtctggaaagaggtaggttggggaaaatgtggcccatcacctctcctgcacacaaatgggatgagtcattttgactgacagtccagcaagatgtggaacaagagctataaatctagggcatgtggcatgctgtgttttatcatgcttgtcatcctggttttaagtcatttctttgaagaggaattgtgttcatcatgatggctaatttttttcaattgtttttaaaaacaaaaaaaccaagcagcagcaacaacaaaataacagttaagacattctccactaaagaaatattgttgcacaccgtatgaaacacattttaaacccagagtttatatttcaattgactaagtttcttaattgtaacattcaaatcttacaggccccagttttgagggtggtagttaaacctttactattttactatttcttgtgcattctcagccaaggactagcaattagtttaataaaaaatttgtcttttgcgtagatctatctctattccttctaaaactgcctaaattgttctctaaactagttcatctaaatgtaaggaataattaggatcattttgatttggttaatccaaagattaatcagggctgtattattgccaaaggtcttattccagcccaggaaaaggatcataataccaattctcaacccttatcagttggattttctgtacgagggataggtctgcagtaatgagaaacttagttgtgatttgtaattgaagagagtttttctattaactaactatgtaaagaacaaactcaggaaggcgagggctgaggtccccttcttggtgcctatttgtatgacggggcctgatggggcagcagccggccaaaggcaagaatagagacttaagctgagacagaactggggccttgtcctggattctccacttgttcactgcgccttggaaaagctacttaaaccccatgagccttatttcatcacatatagaatgggtttaatactttctccttaaaatgtttcccctcactgtctatccttcctcacttaatcaaaaaattctggtttattggttttatacattgggcttcctggaaacattttacgtagagaaagtttccctacactttaaaagaaaaaaagagattgaacatcactgcttataatatttggtgagttccttgaaggcaggatctgtgaattgtttacacctctgtcttgacagcctggttgaggacctggtatttaatatggtaggctctgaatttttggaatgttgaatgaatcagtgaatgagtggatgaatctataataatgcagaaaatttatgttttcatgtccttcagccaagcactgttgtgcactgtggtgctgttatattagacgaagaatagaaagttaaaaagaaaaaagaaagctatacccaaggaaatcagagacgccttttgtagcattgtgaaatgtcatggattttaagtcacaagaaagcaaaaggatccttcaacagtttctgtacacagccttgcacaatgaatcgcataagaaaggcttttggtaatgacgacattgaaaatgatgatgagtctcccttctgtgggcttcatggacactgtcctggagctggaagtggccagctggcagggaaagagctctttcccactcatgtctttgtcctttgtttattctcgattactccctttagtggaaggctttccaagaactgtttttcagttcctggaggctgcagcagtggcatcctgaagggtgagtggtggcagaggcagcgaggagcctcccaggctgaggaggggcccagtgcaagggagagtcgggcccaggagtgacactcaacaattttgttttgaacttctctgttatttccagcaaagcgatttccgtgacattttcttgtggcatttgaagggggataaagtagatttttttttctttatcatatttttttccttttctccctctccaaagcgatttatctggtctttctccaagagtcagcactccgcagaggctaatcaacagtgtgcatgttgcagaaggaggcatatgtgtgcttctccagctgtgtgggtgcctgtgtacacacacttgtgtgcgtgcagtgaggcagcagctgtgggcacatcaggagaaatcctgtcacataaagcttgtgatgaagatgccagtgataaacaagctgccggaggcccactgggtctcctccactcatctcccaccacattcagactctctggctagtggattatccataaccaatctttaatccctggcttggtctcaggtgcctggtcctattactctcctgatgtgtgatcatgaaaagaccaattaattttaatcttagcccaagcaaaatataattagacaaatctgctagaagaatatcatatgaggcatttcaaagccaaaagcaggtcaaattctgccattggaaggccagaagacaacgttttgttttctctttgtgcagtagaaccaccattgaagagatatcacttatgctactctccacagcaaccagagctgagagaggccaggttatatgagtgagacaacctcatttttttctgtctgtgaataaaaataacaatggctatgctagaaccgtagtgcaaaatgtaatgaaataacacctgtaaactgtaaagtactatatgaggagaaggcatagttttatgaacacaaagcataacttttttttttttttttgagacagagtctcactctgtcacccaggctggagagcagtggtgccatcttggctcactgcaacctctgcctcctgtgttcaagcaattcttgtgccacagcctcccaagtaactgggattacaggcatgagccaccgtatccaagtaatttttgtgtttttagtagagatggggtttctccatgctgtccaggctggtcttgaactccctgcctcaagtgatccacccacctcggcctcccaaagtgctgggattgcaggcgtgaggcactgcgccaggccccaaggcatactttttactgaatgaacacttgctgtgctgggattgtgcccagctccctgatctgcagcagccactctttgggacagttcatctcctccctcctgttaaggatctgcattgttcagtgccacctgccaggacctatggagtctccccacgttggcttttctcgcctggcctcttgtttaagttggttttgggatttgaaggagtaggctatcttcaagagtgtgtccaccaggaacctggccagaattcctgacttcaaaagaattcttaggaagagtctcacatgacaatgaatgcactcacagagccgcagaaacccagcaattcattcttcctggccctgagagggcccttttgtatctcccccacccctattccacccaggatgcagcagtcacaaagcaatcatgaaatatacccatctcgggcaggcttaaatctctgttgggtctccatttttctttctttaaacacttatggaataaatggaatttataatcagaaaccataaaatgtctgatttattactcatcttgatgacaatatttaataactcgtatatgtttcattgcatctttctactgccctgttgtggaattttactttaagggagcccgccctctacgtctgataccacaggagaagagtctcctttggagtcaggggctcagagttgctgtgagggtgctcagctccctccaggtggggtgggaatctcagcttctcagggcagggctggcctcgtcccactggacggtgttctcacgacacctgcgatgggggtatgccagggctttgtcactgacttccatgctggaaattccatatttgtagatgaattcctttggtccttgaaagcattttcttttcatgtgttctttgttaccattctgctgttctcgggaggaaaacgtgtcctcattgagtttggggattctgtaataaagagacatcctgtgagaagggggttgtgcctagagttggggacaggaagaaagctcgggagggaagaaaccgaagtgggattcaaagcgaggccagcatgcttgatcattttgcttggaaggatggacttaccctgttaagctcctgatcttttctttaataaaaaatatgtcttggcctggcatggtggctggcgcctgtaatcccagcactttgggaggctgaggcagatggatcacctgaggtcaggagttcgagaccagcctggccaacatggtgaaacaccgtctgtatttactaaaactacaaaaatttgctaggcatggtggcgcatgcctcccagctattcaggaggctgaggcaggagaattgcttgaaaccaggaggcagaggttgcagtgacccgagatggcaccgctgcactccagcctaggtgacagagggagactccatctcaaaaaaaaaaaaaaaaaaaaaaaaaatatatatatatatatatatatatatatatatatatatatatatataatgtcttatgttcatacagcactttacagcctacagatattatttcattaaatcttgcactacctctctgtcatagccattgccatttttattctttagacaggaaaaatagggatgtctcactctcatataagctggtctttctcagtgctggctgatgctgcactcatgagtaatatctctttaacgatgactctctcttaaaataaagtgagaggggaagatctttgcctaagaggagttcccaccacccctaaatactccagtgttcacctccccggagtaacggctctcacttccttgccactatgtacgctgccaatcaggaaattgacactgatgtcaataccacctccaatccacggaactcactcagcttttgtcatccatcctgacaatggctctttttcctttctgggccagaatccttcccaggaacacactgaattcagttatcataacctacagtctccttcaatccagagcagttccttggtctcctcctacctctcagcaaacttcatgtgtattcaggcttctcattctgtaaaatgacctcgaacctggatctttccaccttttactatggcccatcccaggggtgcatctgggtggaaacatcacagaagtgatgctgtgctttcttgggggccttcacatcaggaagcacagcgtccacccgtcccgcagtgatgttaaacctgattcctgggtcaagttagagactgccagatttttccactgtatggacaactttttctggaaacaacataaaaacattgaaattttgggtcatcttaatgatgacagccccactcccaaccaccaatcttcaacactcttacttttaaactgaagtaaacttattaggtgaattcaagaatataaagcaaaatcgagggtttcagaaaggtggaatggaaaatagtcctgctcgtcagctttgtagcactataatgtcttgggaaaaacatgactggcttcaaaatcaaaacatattaattttttgaaaaaaatacttatttgaaaaatattgatttttttgtcacctttgaatcagaaagattggaatctagctcctgaggtcttgtggataaacttccaaaaaatccttggctcaagctgtggctcttctcttgcagtcttaaatagttgtcccaaattcctttcctcttcctagattccatatatagtcttctttatgtttcaatggtctgtggccttagaatcttgaagagttgaaataattatctgttataaaaagtggggtgttagaagttttgtgtttgtctgtgtagtgtttgcaattgttggtttgctttttgcttttaccaccttcaaggattacaatagattttactgcatagagccatagtggacaggagataagaggctggagacatcgaaacatcaactttcttctttctattccgcctccctaccctctcccacatgcacaaacacacatgtgcacacagccatcttggcaaatggctaaatctcttccgacccagcagataagtcataaaactctcaataaatcgaaccaagaagactagttttgagattgacttttttctccttttttgaaccactgctgaagccttaaggaggctgcagcccttgctggtgctggctctggcagcagaactcctagtcatgctcagttccacagcaaacagacctggatctaatgctgaattataggctagagaaggagaggactcaaggggcagataatcacaggctataaataccttcaaggtaacaatgcaaatgagggaagggaattgttcatttgctcagcaggtgctaggacaaggagcactagcttaaagctgaggaagagaaagtttaagctggggattagcagagaagctcctcacacagagagtttcctgcccagggctctggacttgggagtccagtgccaggtaccagggacagaagcatgataaaggcattggaaagaattcctgctcgattcaagggtcacagggctaacccacagctttctggttgttatctatattcttaggatgacatatacacactctcatttgcctccggcgttcaatttatagcctggctgttcaggaaacaaattcctctggttcagttccttgtggcacctggaaggataaattccaaatctcactctttttttttttcttttgcccccaaagctggggttagctgaattcatgataactaattctaaactctgataggtgctaatcccatatgcaaagatatagggctcctgaactacatttggcaggtagggaacagtcagatgcttaaaagatattagccaccactgaaacaacattccagtggtaaccattactgcttaaattattgtctactttctgaatgtgtgtcttcatggaacttgccagaaccttcctatggagaggaatcagtgtattcccccatggtctgctttcctacacaaatgtccatagtttccaccctggtttcatggctcatttcctaaggaggccttcgctcagctgtgtccaaccaagtctgggctctattgtttgtgatttgtcttccattccattgccctcattcacacgcgttgagtgcttaatatgagaaattaagacaataaggacataggcaaatagaacttttccttaccaccctcctctcaacggtttgagggagcacttcagtagtgaaaggtacatggatttgaaatcagaaacaccgagttccagtcccggattggtcagtttttaatgatcggggtcattgacttgaccctacagaatttcagattggggataataaaatctacctaaaatgtaattgtgagctctcagttacacacacacacacacacacacacacacacaccccccaaagctttgacgcagaggagcagccaatactttgtggacaccagcatgcaaaacacagcggaaaaagtgcacagacagaaagagtgtgaggcagcattttactcctccactaagaaaagctgaaaaatgcagtaagggcatttagaagagagaaagatatccccacttaggaagtaccaaaaaggctatagggttgtcatattttcagcctacaatttgtttctctccaattattgagtaccttgtctacctactcttcactactgaggagtaatgggggaacaggacaggtgaagatgagaagtgacctgcattcttgaagagacagggctgtggatgcaaattgctattccaagtacaggcacagcacttgcaggacagaaggttgcggggctgaccaaagggtgtgctgtgcccatctccctctccagtagagaacaatgtcacacaactttcttctctttgcctaacatcaattaattgcgatttagaaaatagggtgaaatccaggaagagcttcacagaggaaggatatattccaacaaagggcccaagtgagtgtcttgcctgtaggaaaaggataacagcagaatacatatgtacattagtcagaattatctagagaatcagagttggtaatcaatagggtgtatgtgtgtatgtgtatgtatgtgtgtgtgtctttctatctatctatgtgaaagagcgagatttgaacaactagttaatggaattacagagaccggcaagttcaaaatctacaagatgggccaacggggaagagctggtgtcccagctcaggtcctctggctggcagaattccctcatcttcaaggcaggttagtcattttctattagaaccttcaactgattggatgaggctcacccctgttatggagagtaatctgctttactgacagttcatggatttaaatgttaatctcatttaaaaacacctgcccatgacatctggaataatatttaatccaatatctggatgctgtggcccagatatgtggacacataaaattaaccgtcacaacatgatagagaagttacttcatcacactggtgctaaatactgctctctttacattcggagtatctcgtgaagagagtggggtttggactgagccttccatgatgggagaagttgagggaaaattcaattcacaattccggtgaggaatgatgtatctgctggatagaaaaagaaagggaacaaatattctctgcttatttgtgatgggttctgaggcaggcaactcttagcttaattcaagagatcttatttaccatatttaaacatttaggcttgctgcaatgagcaattgataaaaggtaggagtttctacttcactgtttttttttcttttcctgagaaaatagggaataggtcaaaaaagttcaggaaaataacgaatgaatgggttgaggagaaagatcaggctgtgcaaaaagcacaagcagtcacactccccatgacataaagttgatgacatatcctgagtgcacatttctactgaggaaggaaaagatggcagcacctgccaaaaggacttctgtgctccgtagcctcacacccagaatatgactcaaaccgtccccatgaatgagaaaatcaaagatttttttcttgggctgtttgctacttgtcaagacttacacatcaggacataaccttttcatgccaattatagtgcatcttctaataattaaaaaggaaaagtcaaaacacgaatatttcatattcaaaggtcacgctatctccagtctccttcccaaagctggagacggggaactggtgggcttctccatcatgatgccacaaaatccaaacggaaatcatggccacttgtctacaagtaggtcacctcttctctctcaaggcatccagagccagagcctgtccagatcacagagagattctcagacacctttgagttatggccatagtcacagagcctctaaattaacagagagggagagagaaaaaacagcaccaggtatatagcgccatcactgttcaaatgaagaaactgaagtctagagaggagtgattttctttttgcgacacaactaatttgtggcagaatcaaggctcagactcagttggtttgacccccataccgtgcacattctctttggcttagtttacgaactcggtgtctgaaatattaaagcaaaaggtggtagagggaagatgacaagccagcaccaaaaccaggcgtggtttccctactccttcaaaggcaggaggctgtagttgattttcaaggtaaacttcactcccctaccaccccctaaaagtagaaagggcagcatcatatctttgtacgtggacaagccctgcttttcatggccagatggcattgaatgggagtgggtcttgacttttcttttattaaagggatgcatgtttgtgtgcactgggggaggaagtggccatatgatagctacaaataataatatttaatagttactgaatccttaataggtgacaggagctattctaagcccttcacagggataaactcatttaatctgtacagcaaccctacagactagatgctagtagagtccccatgttatggataaaaacactaaaaagttggctgggcatggtgactcatgcctgtaatcccagcactttgggaggctgaggcgggcagatcacctgaggtcgggagtttgagaccatcctgaccaacatggagaaaccctatctctactaaaaatacaaaattagccggacatggtggtgcatgcctgtaatcccagctactcgggaggctgaggcaggagaatcatttgaacccgggaggcagaagttgcagtgagcagagatcgcgctattgcactccagcctgagcaacaagagcaaaactccatctcaaaaagaaaaaaaaagaaagaaaaaagaaacagcaacactaaaaagttagaaggttttaatattcccaggtctcatagctagaatagggcagagctgaggtttgtggctccagaaacagtgttctgaactcccacaccacagcggccatgtagctttgggcatctggaggaagtaccgcctgtaaccactatgacattccacaaataaacaatccttgggtctagcacagggaaacacgggtcccaggggaaacaccaagaagagcacacagtgatcggaaatcatggaaagggggccattcgggaagaggctcgccatcctatcttgagctggtgattgacaaatcccataggaactatgtcacctgtgggttcctgggacaaaacacttctgtacggggaaagaagacaaaggctcttttgtagaatacaatggttaataattcttgagtgcttcctgtgtgtcagggctactcttagccctttaggtgcattcaaccttcacagcataccatgaggcaggggcagttagtggctctattagctgaggcacagaactttgcagagcaagagcccagcattacagctgggtaacagctgatgctgagacccacggtttgggtcaagcagtgtaatccctcatcctaatgtaaagaagagcctcagagtagagcagggttgacagaggccacggctctgaggagtgagtaggtctgcaggtctgtgaagactggacaccacacctcacccgggaagcagagagggtagggtttattcattcatccaagctgagcacctaatgcattccaggcactgggtatacaacagcaaacaggcaaagactcctgccctcacagggcttccagctggagaggaaaaggtgataaagggaagagagatccggcatatctgtgagaaccaatctagcatggtggagcccttccctcaagcctgcactggctacacaactgcgggcaggtgggggccccgtggagagccagctgacacataaaaatggccttttgcatttctgctgacatgtcgtctgtatctgatggagcaacgtcttcattatgaaattagatgaaaatcccgatgcacaggctaatagcatcccacgctcttcctcaggggctgagcagcagaaactgcaagagcaaggagcagagccagagcctgcccccaccccatccaattccattttcatacccacctgtcatctccccacaaacgtcattagttcacagaggggaaggagtctcattgcattatcagccaccacaacaaaggagctttttgtactgaggccgcggttgaattatggaataactagatacatttgatacaagaggctccctgatgggacagggctccctggggcccaggttccttatctccagtgcaagtgtgagcagactttctgcttaggaaggctgcacatggtggccactgaagaccagagaggtgtagttgatgagacagcaaggtacgagaaagtggggtacgtcactctgatttctgccttggaaggctcttgggttcattcttttccacccagggagaaagaaagtggattaatacctggaagattaagcacctgactccctgcctttccttcaatctcctagttttcccaagagacccctctcttccccaccagccctgccaaccagtacagtttcaaccttgccgttctctgagggcaagccaggcacaagcaaggctcagtgaagccagtgcctgagtttgatttaatcctgtccagttcactctgtcctggttaaatgctttctagccatccttccctgccatgcatctgtttgtaatggttcacgccatgaaaaccaccagcttctatttaataaaaccaagcccccacactcccactggcaatggaagggccttggacctcctggctgtctctaattcctgtggcttcatcctcctcaatgaaattctctgcccaggcaggctgtggaggagactgccttggcttgggagcctcttccccgttccccacctggggatgcaatggttttgctggggcagcagttcattatccagtcctgagttgagtcacttttgctcatatttgcactctacctctaaaaagatcccttctaactgggtctgaggcacgcctcttgtgtttatagagtaaactgtccatttggtggctgctgtcttgctaactcggcagggattgctgtttgcttgtgtctccttctgtttcccaggtgcagggctacactagagattcaggtgagatccctgcagaggccagggagcttgagggagctttcctacaaagctctgaccattaccctggtaagatgacagagccaagctttgctaacgatgtttctgtgctttttagcagggaggaagggacgctgtgtctccatacatccctgaggaagggcttgctggtctttatctgtcccgctgggatgatactaagacctctcattgatagagtgcctactgtgcgttaggcactgttctgtgcattgtctcatttaatcctcatagtagctccgcaagcgagcactaccattctcattttacaccttgtctaaggtcaaataggcagctggtaaaacccccatcagtatagctctaaagcccctgatgaataagttctggagaagtaacgtacagcatgatgactacagttgataacaatgtattgtacacttgaaatgttctaacagattagattgtaagtatttttgtcacacacaccaaaaagaggtaactatgtgatgtgatggatatgttaattagcttaattgtggcaatcacttcacaatgcatacttacatcaaaacatcatgttgtacaccttgaatatatacagttttatttgtcaattatatctcaataaagctgaagaaaatgaaaagactgagtgcctgggaacaaaaacaaaaacaaaacaggaaattcagtgaatcctgatttctaacacaatgaaacccaaactgtctagcgagccttgtgggcttctttctggcttcttctcctgccattcttcaggcacaagtcacttttcactgtgtcttaccaaacaggccaagatgccttaaacctcagcttctttgttctttctgttgtgtgctacaaattatctgattccgctctccaattggtaacttcctaccaattctaaaaaaactacagatccatctcttctgctaagtgttcccaaatcctttgatccttagatggactcatcttcaaaatttcagacttgttagatgccactctctttgctcccatcgcactgtaggtaatgtgtatacacatctatcttccccattaagttatgagccaccagaatgcaagcacaggacctcctactgcactgttgtccttgtatctagttcagtatttgctatattgtggtggcttatcagatgattatgatagcactgttctaggcactttatatgaagaaggtactattattgtcatcttcagtttacagatgagaaaaccaaggcaagaagagagtaacttgccacattaatccctttagtaagtgaaggagccatgattgaaatctcagcttctggcttcagtgcctatactttgagttgctactcaaaactgctttccagtaaaatatttggttaaagaatattttacgaggccaagctgggtggataacctgaaattaggacttcgagaccagcctgattaatatggtgaaaccctgtctctactaaaaatacaaaacttagccaagcatggtggcgtgcgcctgtggtttcagctactcgggaggctgaggcaggagaatcgcttgaacccgggaggtggaggttgcagtgagctgagattgcaccactacactccagcctcggcgacagagtgagactcgatctcaaaaaaacaaaaaaagaatgaatgagaccatggataccacccggcctgttttggagagggcatttcacactgcggagaaatgcgtcgttcattcccctccagctcatgactcattttgacccatctgccagcccggatctcctgccttaggaagtgagcttggcacaggtgagggctgttctcctttcggttcagccccaggtttggttccttcaggtcaaaggtcactgcagcatcccgagacaggtctcttgtggtacctgccttcccactctttctccctcctccttccacttccttgtcgcagatgtaaaatcctcacagccatctctgacgctgctaaccacaggcattcaggaacagtcttgctccaaatcctgcctcctattttcatatttcctgtggcgtcttatagaaatagcagaacaattgctcatccacagggggtaaagggagcaggattttatataattaaattttaaagtgacaagtttttccagcctgtggggtaggtagagggaaggggagatgagatgaagacctcctgcatttaaagaggagcctggtctcggcatcggcgacatagaatctagctttattcctctttattttttttttttttattttaccagtgacaaggaccgtggacataatttgtaccttcggtgcagcctctcttttcattgagctgcagcagcattgagtgctaaatgagtcccttgtcaaaggctgcttggagtcacccacttccaaagggagcgtccggattttaggaagtgttggtaatttatttccatctcctgcaccagtgcaagagaaaataaaatgatggttcatctcccaaaaggaacattcttaacatgataagggacagagatcagaaacatctgtctgtagcaagcaggcctggagtttccccataaacacaggtttccatgcaaaccaaacaaaggagcataagatacaggccaggcagattccacttcagctcccagattgaagtaagtctcacagcctccttccttttaaggtaggggaccagagggccagcctgggctctgatggccacaccccagcccatacccccagccaggctggcctcacacatcacgcctgagtgcacagcacacaccactctccagccatttgttcctttgatgtgtgctaagcaaaacataattacccactttgtcatattgcatgtgactttgacggcccagtgtgtgggcctttaaaaaaaaatacattagaaggtcctcaagggaaaacagtgctccttttagggtttgtttcaggacttccacaaggttctaaacaacagactcagtggagcctgtttgcctagtaaggagtagggactttgtcctcaccgcctgtcacttacaaatagagagaaaggagagaatacgaacaacagagtgggaagtgcaaagagaggcacatctgaggttttcatgaagaaactgggggaaggaaagtacaggaacccaagaggcatggagcactgtagcgcccctcttttgcatgagggatcagtagcatccctcttttgcatgataaattgtttccaaaaccaaagatggatgtctctgcaggaaccctctccctccaccttcagaaacttcctacttaggcatgcatttagctcctttcccaaatcccttgtattcaaagtctcatttctcttgttcacagagactcctccttctcagcccacccaaagctcatctctccagcagtgcactcctccctgacccaattctctgctccaaaggaaggcacctggctactttaagatagcagaaatatgcacagcacacacaggccctctctctccctctctctctctctctctgtctctctctctctctctctctgtctctctctctctctcacacacacacacacatatccacctcacccctgaccctcagagacttcccctctttgtagagacacacaccataccccctggaaacagagctttctaaacacattctgaatctacaaatgctgctagggctcaggctgtgaggttccttaaatgtgaagtctgctcatgactgcaattaattggcattgctgtgctaatggtaaggcagcctcctgtaataaccaccagcagcctgctgagtgcagggggagacagtggtaggagctgagccctgtgcgttgtttacagtagaggagacgaggaaactcatgagcgctctccttttttgtaaggcaaagtttcacaattggttggtattagcaattttcaatcatcttttattagtgctagattgattttctgggttttttttctaatgtatgaaagcagaattctctgaacaactttcatccctggtcagctgattaaaaatagcaccactacccagttgcttatcaagaagctcagaacgagctcctcgtgaaaagctctttggatgggaacagatactgtgtgctgctgatggtgccacccggacgcatgctaagtgagatggttatctctgggatgaggttgacttgaggatcccctactcattgtctgtgtctctggcagaaccacttttgacagtgggatggcaggtctaggggatttgtcagaatcattcattccttcaaccttttctgtcctcattctgggcaagcacgtccctgatttcagggtgcaaatgaattccagctctcctctagcctagcgagaggagaatgtgcgaatttgtttagactatgtcagctctctagggctcatttcctcatctacaacatgggcacattgatttagatgacttctatgagtcttttcatctatcaagtaaattggtctaataaaaagactaaggtcttagaaacaagctaatcccttgtagggaggataccatatgttgacacccaactatatcagaaggcagtgtgttcaatgtgctataggagacacaaaacattacaggcattcagaagagagagatcccttctcactgggacgaccaaaagacaggactccatggaagggttgcgggggcagtcagtcgaagcgtgtcttgaggggtgaatagtgttgattgacagagatcgagatgaggtataagacagggttgaccacaagttggggaaagcacttgggaagatgctgtccagaagtatggggaatctaaatggtgtggtgacttgacttccaaaaaaagaggccttttcaaaaagaagaagcacatttcacggggccacacgctgccaagagatcaaggagtttagccatgacatcctgagcaagcagctctccagatgcatagcaggcctctggttccccgaggactctgcccactccaccagtggccactggaaagcaccccacagggctctctgcggtgggagttgtgtcactggtccttgagcctggcagtgtctataaatcccatgtatttttctgtggacaacaaatgctgccttttctgatattcagaagtgagataaatggcaggcctgttacattgctcagacattttggactttctttctctctcttttacatgtcccattttttcactgggcctaattcttgacaatggttctgattctcattcgtctgctcctgaatcatagtcttccttttgccctttgtaaattatctctgttatcctatctaaacacttcttactctctaaaatgagccacagcctagggagtatttctcaaggagagagggtagcttcttgtatttattaagctacagcccagtaaaatacactgatttggagttagacgactaaatttgaaaccaaggtcttccacattccactatgggaactttgtcagctgctcctcttcttcctcctccccttctcctcttcctcctcctctttcttcttcttctttcctcctccttctcctccgccttcttcttcttcccatttaaggcttggttcactcatctgtcaaatgggacatggttctgctagacagggtagctgggtgagaattacattacatgataaagtataatttattccgcaaatctaacattttgatatcaattatggttattgtaaccgtgcaaagagagagaatctttctcattctcaaaagtttatcaaccatttcatgaacaaagtaatgcgtgtgaattacaattgtgtgcacatagtgcatcactcctctcagctgtgtgtaatttcctttgttgtcaggaagccctggctgatttctaatttaaaagtaaggcatgcagtgctttgccccctacttttctctgtgtattttctactagatgtggggtgcccccagtgcctctaatgagcatttgactgcattgtcggcatggtgcgggatggccacatgctgccctcttgttaacagacttgagggtggaggaaatttaaagacgctgctgcctccaagctcatcaggttctcctgtcaaggagcaggtgacactgtggactgggcaagaggggtagccatagctttgaccttgcccaggccagcccggcatccccaaagagccagagctcctcctgacaagaatccactgtgaagcggggcatctcattgcagaaggccccacagcagggccacctcagcatttcagcttccagacagaaaactcttctcctgcagcctgctgttcttccctgggaacagccttggcataccctttctctcccttacagcagagctctgagtgtcacttatggagctaagaagtcactttggactttgagctcttgttgggggattctaccttgtctggaagggcagaaggaggcagaaaaaccaagaactttataggagaacagcatattcagcccgaatgtaggatgtggacattgtggtctggattattggtagggttgggtattagggctagaattttaaaaatgtgcactagtgtatcaattattttgggtgctcaattgtttaggtgaagtccctttgaaattgcagcattgctggcctaaaatatatttgaaagtgagaatgtaggaggagcagagggggagccagaagcccactcatgcaaatacaggtatataaatgagtcagtttcctccttcgtaaagaagaaaatgattcggagttgctttgttggcaggttagctaatgagggggtgttgtgttaattaacgttgcaaagaatagtgaaagcattaaactttagaagtaccctagtgcttctaggagtattattcttggtgcattaacaggctgggtctgccaatgtctatgagagtgagggaataaacgaaagctggagcagaaggcagaagacgtgtggacacagcagcaccagctcggggctgagtgaaggaatctcaaagtaccatcttcagagctttaaaatatctttctcccaaggaaatggaaatggaatactttggatgtttttggttgcaagtaatcaagccccttacagcagatgcttaaaaagtgagggcatcaaggaagcctggaggtggggtgtgtccatgctcagcaatggcctccaggacccaggacctcagagttggtctccatcatgctcggcatgtgagatctgcgtgtcatgagtgaaaggtggccacctttcttcatctctcacaccatcacctaaccatgatcaaagatagtaatcaagtgggcctggaagagggcgcatgtttctttttgatgaggaggaatatctagtccttctactgtgtaaagtgacctgcatagctgcaaaagagagagaaaggtgaatatctggcatttttagcttcttttgtgggaggcaggctttgccagtaggaaagaaggaaggagagggaaaggcattttatatagaagtcagcaccgaacacctctgtgaacaatggacttctggataacaatctggtgtttgttgggaaatactctgtgagcactgggggcaattgtgcggcttctcttcaaccgccagccacatgcttgcctaattaggagacacgagccagttactctgctgtccccacctctccatgtgttcaggcttggtctataaagtattggcctaaaggcactttcacccatacatgggtcatccccaccaacagattcaccctggatgtgcatatgggatccgcactgtggcccttccacataagaaagtaagggagtgaagacttgggaagatttatgagctctgcaaaactggatgtggtaaactatgtgtatggcagctctgaaaagcagtactgagcctctgcttggggcctgacagacatggaggcagttctattgaaaccccaggcaaagggcctaatgagaaatcagtcagatgtgccgtgacactgcctaacccacaggcttccatctgcttgcacccttcgcttccaaacagagcaccagttgtgtttgttcagtgaccaactggctgtccatcgcctcacctcctccagattgcaaaccaccagcagcagcccgggctcctccctatcaaaccagagcagcccagggaggttgttcatcctcctccctctttcctgatgcatttttcatcattaaagggaaaatgtcattttggtgacagatactagtatgattggtgtcaggaatgaatcttcctttctctgtcagccttgcttcacacaatcctaagacaatgttctgttgaaaggccacttccatttccaacgccagcagtgtgggagaagagcaggctttgctgtgacggatgggtctgccaaggctggcgctgtgccaaggggtgtaactgaagctcgacccttgcacaccgggcaagcctgaagaagcttctgggaagctcaagtcttatttctggagggattctgctgagaacatatcttaaaaagagaaaacctgcagctctattcggtgattaggttttaagaggtggaagagttgccatcatcactgatatatagagtcccataaatccaaacccgtgtattggaaagctgatctggaaatgaagatttttattttctggcagcagaaatgtaggtcagcctctctagatcttttccaggtgcaggcctggacctggcatgggctggaagtaaccatacatttcacccatacagtgtgcctcatctgacactctgcataccacaacctgttaggactcatttacagcttcgttttctcatgcatgaaataaaggtaatagtacctagactacctttctcaatcactgagaggtcattttatttcaatggatatttgttgaactcacactcagggtcatatactttgctcagtgttgggcaggtacaaaaatgaacaagaaatggcaactgccttcagagagcttacaacctagttggtaagatcagacaaatctacagtccattacaatgtagatacacatacacacatttacagagttctagattgtgaaatatatatatatattatttcacattatatatgtgaaatatacatatatatgtgtgtgtgtgtatatatatacatttcctttaaaataattgatttcaactaatagaaaagagaggcatgggaagcattggttaaactaatgtttcatggaggaagtagaatctgaactggttcttgaaacctgaataggatttagaaagctgtggatggtaggagggcatcttggcagagcaaaagtctgagcatctacacagtttgtgatatgcagggcaactttccaagaagaacgtctagtccaggttgattgggtcctaggatgttacatgagtgcaaaaatgaggccacaacaaagactaacactatttaattaacttgggatacttcttgattgtcagtcttaagagttgggtctttatgtcataggcagggggagccactgaaacttcctacataagtaaaggacatcatctgatccctgcctgagaaagataaagctggcttctgcatgtgaaatgccgtacatctgctattcttaactttttctaacataaaaatcattgaaaatattttataataccctcattactgtgcagaaaataagttcacagataacatataacacctatcacatacttcaaaaaatgacctatataaagtctgactgaatctgaaggagaaataaatagaaaatgattgataataatataaatgtaaaataaatatttggatacaactaccccataggatataatgaagtatggaagcgtctatatgcagaatcaccatgaatgtgacagctaagcaacagtagagacctgctacaaggatgtagaattaattgatgactcaatattatgagaaacattcccactgagtacgtgatttttcaaactagtgaacacttcttggtaaagatgtgaacaaatcaaacacagtctttctttgacttgcaggatagttgcattcctggagaattagcgaatattaaaacctggcaagaatatctgtgtttacatgccaaatggagtacattttaggctttttttttttttttttttttttctctgagacggagtctggctctgtcgcccaggctggagtgcggtggtgtgatctcagctcactgcaagctccgcctcccgggttcacgccattctcctgcctcagcctccggagtagctgggactacaggcgcccgccaccaagccgggctaattttttgtatttttattggagatgggctttcactgtgttagccaggatggtctcgatctcctgacctcgtgatccgcccacctgggtctcccaaagtgctgggattacaggtgtgagccaccgcgcccggcctaggcttagatttttgaaagaaaaaggtttcactcacctaaatgtctggcaggcatttgacgtccgtggctgaatagccatgcgttgctgcgtctctaacctctgcggcctctgtacactaaacggcagcagtacctctccaattatggtggtgaccaatatccaatcaattttccactcccacaatccaaggagtgtgccctgcccctgttaagaagcactgactaatgcagaggcagggttggaagcagagagatgagttaggatttaattaaaagagtagagagagaggggaaagaaaaaaagcaagagagccttggtggtagcattggagactggcaagaaggaaaaaaattaagaggcactgatctaccagtgagcaaagggttggcaatgcccttggtaaagtttacatcactgtgcaaatattgttgcagttggagttaaatgtcatcacactcactgtacagagatggtatctgaagcactgaaaaggtgcaatgacttttgcaaagacacagcacaggtcaggaattgtgttagacacccagtgccttagaactacacttttactgtaattactaatgcaaaggagcttctactcagcatgggaaattataagcagaaaactcgagtagagcaaatataaaggtagaaataacttctgaaaatagtcaaattccaagtattctatttatcacctcttgatggaacacctgggaaactctaggattccaaacaaagaccaatattccacaatccatccactttttttgtttgctcatacctctaaatattcatcagtaacatttgagacaaaggaaagagataattatgaggggagagtttttaaaagatattaaaggttaacagaattcttggcatttgtgtcgtgtcaatttccatgtaattatgctcaattcccagaattcagtgtcagttgtgcctgttaatgcttaaagatgatatccttggaaaataatttataagatcatttctcaaatatttcggattcaaaccaagcaccctggctaataggctgattattattaatgttattcttggatggagagtgctaggaggtcgtaagtgggatgttgggatcaaagtggatttgttatgagagtgtggttagctatctctcctaagagcagaatgactgtgctcgaaatgtttatataacctgatttacaaacctcttctatttttgtttgataaataataagaatgtgggaaagcacgccagttctctggaatatgactgccttttagaagaaggaaagggaaccagtgctgatgtctgcctgtggggaagtatgaccaactggctttgtggaaaaacattgagacgcacaggcctagatattttttacatgtttattcattcgttcattaattcttctcccatttatcattgaatgtgttttacctgttctttgctgagatcgagtgattataaataagacactctccccttttctgttcttttgaaattgtgtacattccctttgtagtattgactccaattgtgattcattgattatctgtgcaattatttctaacattcatctcttccagcagtctgtagccatggaggttggataccaaggatatgacagtccctgatgtaacacgccacctaccctaggatatgcttgttgaataaatgtgagaagggtgttctcatccctactgggcaatcaaaaataatcttttcaactaacttactctgatcttgatttgggagaacattttctaaagccagtctaatcttggcctaccatgtttttcaatctcttgggctctgtgcatttacacatctgtgtcttcaggaaatgaaattgaaaaataatctagtttcccccaccttctgttgaggccaacgctgtggagcacaaagtcgagaactcaggctcatgcatgatctattgcttgggatgattgctgtcaccattctcttccactagagcgaaaaatgaaaaattctatggaaaacaaattgcttcccatcacgctctaaaatgtaggctgacacggggatgcattgaggtggctagaaagagctaagacagagtttagagacgtatgtcgtaatccagctcttctggttgctagaagtcaaacttttggaacgaggcagccaagtgaagtgaagtatgtgtccaaggtaaattcagaggcagtgtacaaaaaacaagtgagtgcacagaggagcaggggtccccagcccagtgaagagtgaaagttggaggtcatacatggaggaaacagccaagcatgtgaaggattggaaagcaaggcgggccaactaaccctgcctaaagggaactgttctcctcctcagggggcatttccacataaatcatgcacacacttttcatagtatttttaaaaatgcctttaccaagtgtacataaaccttctacaagaagttgtaacataatgtaggggtgagagaagggcgagataagcataattgaagtatccccagccaggcagaaaatggaattactgggtagatgggaccatgacattagaaaggtcacactgggtcacataaattcagatgtccgagttacctgctttggacagtggcaattttacatgagtcatacttcaaaggttacagatatatagcagatgcctctaacctaacaaacagtgtgggtatatcacacgttaatttattcaaaccttttcatatcttatttagagattatttttgtctgtataagttttattcagacatacttgtttttatcctttaactactgtcttgatttcttaagagtttttttattttattttagctagagtttggtcattaagtatgtgttcactctatccttatacatcgtgaataccaaatgtcatcatcaatttcatgttcctcgtttgtagagatttggaagtccctacaaaacaaattatttcaatttttgaattttcctcagctgtgctggtcacttaaatacaacaaatatttatcaaaaccaattatgttccaggcattgtgttaggtttcaggaatgtaacagagaaaaagacagaaattagaccattacatgtattctgagtgttatgcgaggcactgatgcagagggcatgtgccaagtccagtggactagcacagtgaggccttcatgagccagtcagaaccgagaagggtgacgacaactcagcccgagaccatggggactgcatcctaggcaggaagtggaacatgcaaagtccctcaattgagaaagaagaacctctgaggaattagaagtgtaatacaataaaacaaaatctgacatggctccaaaagggaagaagaagtagttgctaaagctgaaaatacacagatgccacgtcctgagggctcagaaaccacaggaaggatttggagctttattcaaattgcagtgtggagccaccaaagatttaatcaggacagtgacaaggtcagatttcaggaaatcttcctttcaatgtggagattgaaacagagctggcaagagcagaaggaggacatccacgtaagatgaatttcaggaatccagataagaaaatgaggagatcttggcttgggccaggcaaggcagtggaggttgagaaaggtggatggatgtaaaatatattttggaggaagaacacaggaaaaagactgagagagagaaagagggagagagagagagaaagagagagagagagattgggtaatgaggggcagtgataagagggaagagattaaaagtgactcgatttctgatttcagcagttggttgcatgaagtttattatttgtgagctacagtgataactactataagcaatactaggagaatttttatggaacaattttgagtaaaaataacatttctttctcgttcctattttttctaataccctttttagtgttttccataaaaatgtttgggccaacacttgttttttggcaaaaattcctgatacctgcagaaagcaatctatagtatcatgctccaatatgtgttgtaaggatcatagcttgggaactgctagccatcactgattccaagattactttcctgggttgtaaaagaataatcagtagcaaccatttgtggagttggtactacaggccaggtacttcactggtactttacataaattatttcatttaaccctcacagcaaatataagaggtaggtattattcctttttaatagaagaggaaaaggagactctgagaggtgagaacattttccaaggtcaagctggtaatttgtggaacttggacataaagtcaaagccattaactccagcattcatgcccaatcccttccacatcactgtctcttcatcgactgcctagatgccagcaacttacatgcatactttattttttctaaagtatcttccattatatttggccacttttccacatatccaaataactttctggattatttgcagctcatccatgtgagctaaagttttaattacttaagggaacctaatgtcttctgcaaacttgggagagttctctatgaattccctttgacagatcattggtaaaaatattaaatttgatttgtcctagcaactgtcccttggggaatctagtattaatacttggccatatagaaacatgtcaatctacccttgatttatatcttagctttaagcagctctctgcctttgaaaaaaaaaaagatagtcttctcattactcacttttctaaaaggtatctgtgatcctgacaccttgtcaaaactgttgtgaaagccagggtagattatttcatgtgttgtggtttattcacatgcacgttgacaacattttccaaattctgcctcctccaggttcaaagctacctgaacagcacataagttcattttcctaagacactcacaagttgctccttctttctcacgacctgcagtaccactggtagttttgtgctaagctagtgaaggaaagcataccaaagctttagggaaatcatttctttctgggaggtgctgcccatgtcaaccccaggttgggaaagaagcacaaggctgtgatgccccaagggcaacctcaattactttatttagaaaggccctgaactcacgatggtaatgcatacaggtggaccaacaaggtgaaagtcacagagattcacaagcatacagaaatgcattttattatttctttgtaagagtcaataagtttgtcagagtcaatagatactttaaattgaagtaaagaattaaaaaaggaagtggatagtttgggtattagtttagctagaaatacaaagaaacttgacttctagggcagtacaaattcaagccttccacaaacaaacagttgagagtatgtttatcttcttaaaatgtgtgggtgccttcccaccacttcacctgctcctcactggtgctttgtcccctccctactaccattcctgtcccggggcctgcaaagcaaacagtgaacatttacaaatcaaacttggtgaactaaacatttagaaccttagagtgaacgattttagtctcatccagttcctgcttccccaaggaaagttcagattctgtgcagccttgatgcattggtttaaagttaactcagtttgaacactaacccctctaattaggtgtttgtttgaaatccatgtctcagtagtcaactgatctgatgaaactggtatggtgtgtctgtatatgtttggtgtggaaatgtaaatgggttacaatcccagcaaaataacatcacagcagttcatccaggtccacatttctaataaagaatattgattgatttcagggatagcaaatatcagttctacccaattacactcttgctgccccttctaaagcagcatgactcaggaattatttcacggcacttagccttttatatacaactgctattataaaatgttctctgtgacacataaaattatatgtatgtatatgtatccgtgtgtgtacagaatatgctatgaacatatgcctaaatggcttatctgagaaactcagcagagattgagataaaacacagcaggatgagtctaaaccatgaagtccagaagaaacaaacactaacagaaaggagagagaatccaaataaaaagaaaaggtgggaagaggtagatacaggaaacacagaaaaaatcccttactgaagagaagaaaaaaaaaaatagggccgcggaaagttaaaggacagacagtgtgcaaccagtccaatagatctctaaaactcttctaacccggatattccaatagtctagtcatggaaggagtgtgtaaatattctctttatggctggatgcctagcatagactgtatctagatagccatgtcccagctaggctttaggggaagattcccaaatgggcaattaatttagatttaataggaccgttactgtaagtttaaataaatgccagttaaatattaacagcgtatttattgaagattaacattgctggttgcattgtgggattttcttttccttaaagaaaccctttatcagaagacttttaatcatcttgactcttccgtcgcttgcctcagatccagggcagctcattaattactttgtacaacagttttcaacattctgaagtggttacctagacgaatgggaagaatggaaggccatataagaagggctatttctgtgcaggaaggattgatgagtgaatttgataagagtgttgagaagcattataatcctagactattagagttggaaatgtcctgggaagccatctcatccaaactcctcatttagaaggcaagaggaagagagcagagctattccagtgagctggtaaggggcagacttagggctggaattccagaccctggatcccagccctttactgagctgtcaccgtactctgaaattgttcctttaattctgcaaaagtgcattaacccatttgagtgaattagtcattagaccttctcagtgacacacagatcatgaagatttttttttgttttttgacaaacaaaggagctaaaaattcaaacacaagcagtgacttatctaaggtgacaaaatgatgggctgagttgaaactagaactcaggtcttctggtttacaaaatatatttgcacaaatgtcacctccaatacaaagtacagttggacccatatgttattatgcaaattcttatgtcattaaaatttattttgtctgctgttgtttttggatggggaacaaggaataaaacctctaaagaaaatgaggggaaaagatcaaacagagacaaaagttctaggtgattgtttagggagaatggagcacaggggtagaagtaatccaagttcctctgagagtttaaaaccccaagttaaaacctggggttttaaactccaaatttgtacttgataaaattgccattcctagggctctttctgtttgagaaggcacttccctactctggctgggctcagaaacattagaactggtgtatgtgtgtgcctgtagatgaatgtctccaggtgactctttcacagaggttacaaggccaatccctgaatgtagaaattaggagagatgaggcaggcccaagatgttcttatccagtgatttgtttaagatggagacctgagcgtgttgggccttgcatggtcgaagaagctttggattcagccatcaggcaccttggagcaatgaagggcttaaaggcttatggtaggaggtcagacattgtggctcactttacaatgggatggaggtgtcctgtctttttgtcaggtggattggctacttttctgttgtactttcaaagtttcccaggctggtactgaaagagaaagctgcctcctcttttgcaagcacaggctgtttcccacaggcctagagaacagaggcctgacagtggggtgggagctggggggccacggctcttcctgctgtgggtggtctagaggctgtgctacttcctctctgactacatctcagcatgacgttcctgctctgtccgccttatgctgtgaactctaagagcattcccagggcctgcactcagcagtctgctcctgggttctctgcatgaatgttacctgtaggctgactcagaatgaaggaagcacagccaatggcagctccttccagtcccagcatgagaagcctgggagcagccaggcctgtgctaaactctttgcagctactccctcatctcatcctcacagcagtactgagcagtaggtaccatgaggaccactattttacagattagattagggcatgtccccaaggtcccacagctagtaatggagagggtgaatatttgacttctggtctgagtctaaaacccaaggtcacggtccttcttattggataaatatgtactgaatgaatccatgactgcatgaacacacaatgtcgatggcattagaggttttcagtgagacacagagcactcccgaggtgcccatccttagtttgtatgagcaccgtctgaggctgtcaaagaagtttctgctcatgctcctttccgtcttgggtcgtgtagcgtctgtgctgtcttctgccatccacgagattcctgcccatgcttgcccatcccttcatctccagctcacttttaagtccagtttaatgtcacttccttagggaagtttcctgatcttccaggcacgatgagaatctcccatcctgtcttttccattttttttttctcacagcattcatcacagttgtatccactatttcataaaattctttgttaaatgtctgtctcccctgctggaagtgcacttcatgcaggggaggcccacgttacttttgcctatgtctctcccattcattgctttccctggccctgttgagttgatgaagggcttcccaatattcagaagtccttcagagcaccccacccctcctaataccccttccagtgaagctagagaaccaagattgtgcctgggaatctggataagtgtaatgagacaaatcacttcccacaggctaggcagacctcagcttttttgtctcagcaatgagaaagttctcaagggcctataggggagtgcagggtggagttcatttaattttcatgaacgttaatggaaataaaaccactgacaaacccaatagcactagacgacacgcaactcaagggcaggggcatgtctttatttttgttcctctcaacacagttcctggtacacacaaggaactcaaaatctgcttgctggttgattaactaatttgagttcaaccaaataatgtgacacccaaagtgattctgggcaatcatggtaacctgtcctctgggggtctctctctcggccacagatgatgcagcagcaggagttactgagtggtcagctcttaaatattgttcttatctgacaggtagagtagaaagaaccctgctgtaggagtcaggagttctgacttctagtctggattggccagtttataaactttatgctcctacgatcaactcctcctccttcctggggctcaatccttcacttaagaaatgaatggattatactaaagatcttccaaggtcccttctgaatgtatcattctgtgatgttacgagtccagggtcttattatgacccaaaacttagataaaaaggaaagactctgccccaaagacccctggctctcaggctgtcccctttgggcacctgcctttcgctgcgtcggcactttgattttggcttgttcatcctgctccccctgacttttctgtctacctccgattgttctatccaccatcgctctgctttatgcatctcttataaagttttatgggtttaaagtccatagatagcctcacctttgccattccttcatatcctccttctcagttctctctatttgtgacctcttttctctccctggagccctcttccccttttcaagttgcacctttgctctttctgctgaaatcctaacatgttggactatagcccagatgaaccacgattttattttgatcctgtattcatagaggagcaaaaaatagcatatatttttccagttcccagcccttccctactgccctagaggcatctctttatccagatttacacatccttttctgattaaatcttccaatatctatttgatgtcacaccactctctaatggccctgcatttcccatcttctcgcctgcactcctatgtgagatctccaccaggagaggggagcctttagcctttttcgacgaggagaagcagagctggcatttgttaagctagtgctcctcttttcgtctcttgtgtgtgtggaatagtgatagctctttagctggccccagcttgctctgggtaacatggagtaaaacaaaaacaacagctaatttctctttcattgggagttcttctctgttccagccctgcttcagtgtacagatgccagggttgcctgaagtctccatctactgcttcctcacctgcctgccaaccatccagagtacacatggcaggctcttctctcctccctcctttgcagtcccaggattattaaagggaatatgattgtttccttttgctcagggagtgtgtatgtgtgtacatgtttgtgagcttgaaaggcattgtcctatagatattttttataacctgaagcaattacagctgtcagcacagagacaagctgtgacaagttgatttatgtgtacagtatatgtgtatgcacgaaggaagggaagaaggagacggagatggtgggaaagagggtggaggtgggcgctcgttaggaatcggctttcaaggaggcagaaaggaagttgtttctataaagaacacaaataatgaaattgctttgaatgtcatcccttttcattaactcggatatgctgggaaaaataaaataaatccagcagtttttatgaagcaggagacaggatataagataagccactaagtgttggtcatatttagggattaagggctgggaagtgagttgacatatgattttgatcttcatcttttcaaaccacttcaatagccggtttgaataaaatggattttgtcttgttaattatgtgggcatctctgacctttcaccactttctaaacttctatgtttgaataaagtttggatccctgcgcccacgaagcaggtatgaggttgcaagtgccttttctttgccctccctgtgagttacctgagcttggctgggttttctgctgcaactgctggattgctaagcttagtgctttcccttcacgggcagagacaaagatggtttgattgtcttagatcaactgcatgcagactggtagaaaccaaacatctcaaagagcctgtaagaagaattattttcttgcccagacatactaatgaagcaatggcaggcaaatgtattaataaagcatcttccatcttaaatggatttctaagtattttcctgtagagttaatcatatatgtaggcccctcgggaaagcctgttgttgtcattatccatatccctagatgcaaaaactaatgctcctttgtacctacctgaaaattagatgcaagagccaggattagcatttatcatgaatcatccctgccattctcaggcctctagggaaatgactgcaaagctcagaatgagcccctctcctttccccatgactagcatttgtttccacttgttgtagtgaggatgtgtttaagaagaggggttgagagggaggagcataagggatggttgaaatgaatggatgaattattagaggtgaccccttgacttgtggagacgaagcccaaattcagcagactgaaagtcagcaaacatatctcacagctttagtatatcatcatatttatcttaacgtggtgaagtttttcaatttcctgtttccacaattgcccgttggaaaatggagacacaatagaatcttccaagaatggactagtgctaaagtaggttaattttcctcctttcctttcaaaaatacaaacaaagatcttctgctccccgcagatgtaattgtttattcctgatagtaaagtcatttgttgcagccataagttgacgattgatagttttggtgttatatatcaaatgatccccagtggccaaaagtagcagatgagtttccctgagaatttaatatcagaaaagtcaccggaggagaggagggaacaattggcccaatgatgagttaatgcaaagtattttgagatattcactgtaaagtcgcttcactcttgctggctaagcacgtcctagtcaactatgacaatggaaaggcaagccgtcttagtctttctttgttacccaggagtgtggtttccacttctccaaagcctacttctgtcctatctctatagttagtgtgagggagatttgattggtgaaatgtttgtgtcctctccaacgtggtatctacatgtaagtgattggtactgctcgaaggttgccagaatgagtattgtaccgaagcccttatggttatatgactcagttataatggttcagtctctttgataccggatggctttttggaagaccatttttctgttatttaacagttgttaacaacaacaacaacaaaaagcttcctggttgtgtttgatagagtctaggggaaaaacaaagccactgttgcctcctctccatccccaaggagaatgtgggtcagggctggaggccggctctgggaatccctgagaagggagcattattaatgtcaccaccactgtgcctgctgagctgctctgtgcttcccccttgcacaagaaccaggcccagccagggaaaggaaacgcaggccattccctcagagccgaagttaagggagaaataataatacaggcacaggaggaccagcagcagccagagaggagaagtgacagggaccgaggcaaatccagtctctccccgggtttcaagaatttgagaaacacacctcttaaagatgaaatcagctgtgcgagagtgtgaggcccaggaaacctgggagtctgctgtataaatacagcaagtggctcacactcatccacccaagtgagcacttttgcaggcccagcatcttttaatggcgacaaaacaagaataaagaatgtaagtgggtgtctgaacttgaccaacattttgatgatgcgatttttccagtttcgcacactaagaggcttctgtgattttggatttgttttatatatggcagatctctagaatggtagtgttgagtctctggggttttgagcagctttgtggggggctgctgggcgggtgctgtactactgaataactatgaggttcttctaaaacatcctccgaacactctgagtttactctgaatgctaatgggattaatctgatcattttaaaggtgcatgtatgcatgctgcagggtgttcctttcccagttaattagtttgtgacccttattaagatgtctcaagtctgaggctgattaaggctgcatggtaactttgtcttttttcctaatttggaagcgcgtaaatggttaaactcctggcctgggctgggctggtgcacagcctgggcccggcgcggcgggggttaaggtgggcgcccgcgccccgcgccccgcgccctcccgccgggatgagagcgcagtccgcgccgccagcccgcccgctcgctccgaggcggcaccgggagaaagtggcggtcagggatggagctgctgccatgacaaccccggcggtcggggcccgcgcgcgtcggggctgctcccgggaggaaggcggcgcggaggccgggggcggccgctgagcttggcgtccgcgcggctccggtgcgggctgcgccgcgccttccccagcgagctaccgagcttggggccgccgcggtccgctcccgccgcccggcctctccctcctcggccaccgccgcagcccctgccccgccgagccccgccggacagcggcggccgcagcgcgcatttgggctccgaggaagttgaccgaggcggctgccgcaggatcccgggcccggatcgcacgaagcccgcgcggccgtctcctccgcgcgccacccctgcgcctcccgcgagctccacttcccatctgctattgtttccgattgttttccggtggcgagcccggctccgaaacttacaaagtgttggatgtcccccgttcgaactgagggactgcagaccgcctctgggtagctggatgaagcccaccccgtccccttctggtaccaaagtgcttactcctctccaaagtgccgtgtctgaactgccgctgggaagaagcggctcctgagacgcgcccacacctttcacctgccgcgcgcttccccctcctcggccaccttcccggcggaagcagcgaggagggagccccctttggccgtcctccgtggaaccggttttccgaggctggcaaaagccgaggctggatttgggggaggaatattagactcggaggagtctgcgcgcttttctcctccccgcgcctcccggtcgccgcgggttcaccgctcagtccccgcgctcgctccgcaccccacccacttcctgtgctcgcccggggggcgtgtgccgtgcggctgccggagttcggggaagttgtggctgtcgagaatgggggtctgtgggtacctgttcctgccctggaagtgcctcgtggtcgtgtctctcaggctgctgttccttgtacccacaggagtgcccgtgcgcagcggagatgccaccttccccaaagctatggacaacgtgacggtccggcagggggagagcgccaccctcaggtagggagctgacattgttctgcgaactgatggtttgtatggggtcggggtaaggggcaggggtgcaggtgtgtgcactgaggcgtgcctgggttggcggagaggtcgctggttccctgggctgcacaatttatggctgcgctgggggctctgcccgggaatgtggcagtcgtagggaaaggctcagaggttctggcggtgagctttttcccaaaaactggcctctgcggctcaggcacttgttaaaggtgaggggtggctggaccaggtggtcgccgagattgagggacttgtgcctggcactgtctgtgcctgagcctggtggccgtggtgacagggggcttggaggggctccccgcgagcagtcttctctgaagttaatgagccccaaaggaggggtctggcttggagtgaatgcccccactcgcccatgccatagggctttgccagccctggctcctgcactctgggagagccgctgctttgtcctgggcctgactgtgcccgggctttcctggggtgccttcatgccgtgagctggtgggcagacagagatgctttctcctgtctgaacgtggctttctgaggcccaagtcatggagtctgatttgtccgtggaaaatggcatttactgtagtgaactgtgttctgttcctgctctccaccaaaacggtacatgcaaaactcgtctactgaagagaaactaggtttcagtgttgggttgggtcctgattggcttctggggttaaggcttacaggcactgggggaggagaagaagaagaatcttggttatgctttgtgtaaggtagaatgattctatctccctgattaccttgcctgcagaaacgctaactgaatttccagtgttgataaaccacacctctcatatgcgggcaaaacacttaatgattgcgatgggaaattttattctctgggattttataagagaataagcatgaggtggacgttaagaaggttcatgggaacgatttccctgcctctccttggtttagtctgccctcctaaataaagttttccaaactaagcgacagaactaaccacaaggcaacatggcaatattcctgtcctttgcacatgaagatttctggaaagataaccctggtgctggtgtctactgttttgcccctctgatgacttcttctaggattgggttgttttggactgtatacttaaggcaatatctataggatagaaaatggtgaagaggaggcaatgtcaatacagagctgagttatcaggacattgccaaaggaagtgtgtaatttagggacccgtgcagggctacaagcatccagtgatcctttgtctaggcaaagcttaacctcatggctctggtgaactcctagttatttgttggctcacgagacccacctcttccactcttctgagcaaaaataaagcaacttccttcccccactcagaaatgattgtgtatctgctttaaaaatggatttcaggggagttacaaatatgcagtgatttcagactacttaaataaaaaaccaaaaataaatgtctagagcagtaataatcaaggaaattttcttgttcaagaaatgcttgttctctggatgccctctttgtccctagtccttggctgcaaggagggcctcccagggacagagacattctgaatggggaacattttagatataaatgggattttttttttcaaggaaaaggtgtaaggtagctctgtagagacttgaagataaataaacaggaagtgggtcctggcagacagagaccaggccagaatctggtctccagaaggtagtcttcaaggcttatcaaagtcaggactgtccagagggtggctgcattcagcagaggctgaatcacgggacaggcctgatttaggaggagcttctttttgaaatcgcgttatcatgtactggctgacttatctttctttgtcttccctttcatggttcttttttctcattctgccggtccccctctctctttcagcactaatgtttgtttgcattttcacatgtgttctcaacccagtggtattgtttgggtgtggatggagatgggaacatggtggagcttcctttctagacccttgaattgaccccaacccagccaagttccttctggaacatctcctgccattctgtgccagcctcaggggctgaatgtcttcctgacactcaagagaaaggccctgacagtggatggagcactacagggcagggattagatgagctagggtctgagcgacaccagcccttgaccacaggcctgacttaggatgtgaatcaggcaccaggtgtaacaagcaaccagtatggaggatgctcaggcctctcaggattgccctccttctcagactctgatgcgctagaacaaggaagggctgccctgctgggatggactttggtggggtggaagcccctgaactctcaaacataggtcctgcattttcttgttctgtgtacagagaggcaagtaggaatttcagaacgtattttgtttgcataaaaattgctgcattttcacgtaacctgactgtaggttgcaaccatctagtagttcagagttctgagttattttctttttgctttgtattgtgtgtgtgtagggggacagaggacccttccttccttccttccatctatctttctttcttcttccgtttgtttttttctgttttgactaatcatataaccaagctgtaaggaaccacaactaggggagaccagagcacccgtgctctggcctggagggccgccatatccatcttcctatgggtgattgggtgatgatggtgatacatgtagttttcttcataaccagcagaggactttttgctctaatttcattttattctgctttgttctcaccaacatcatattttgaggatcttttgcagtccctaaagaataaatgctcagcagaagattctaatttgaggaaactttaaaaaatgttttatcttatccaagtagctctaacaatccttgtggaggtattgggaaatgtttcaattagcatagcactgacagcctgaaaagaattacaatttgcagtctcccactctttctgccctcccgctggcattctgtaggcatatttcttaaaagggtgaggtaaaacagaatctgcattaataatactattagccaatgttaattgagtgctcactatgtgttggggagtatctaagtgttttaataatatctcacctatcattcagcctcatgacattaacactttaataacagccctatggtgtaggagttactattatccctattttacagacgaggaaactgaggtgtggagagtttacatgctttgatgaaggtggcacagctaggaagctttgaagccaggctatgaagcactggtaacaatcacgttaataagatacatagtactatcattggtctgttactgtgtgaacattttatgtaaacagtaacatttactcctcacacctctctgaaatagacaattattcccggttaaggcctagagagggggaacttacctgaaatcacataagcagccagtggcagaccagtatgctagctcaggactccattccttgactttgtacaccaagcttcccaggactattcaggaccctttggattcgtgttcctctcattcctctgtggcacttaatgtcttccctattcattttggcttagaccctgttttccagtgttatctctctgtcttctttcttcccttgggctgcagagcacctcttggaaagcaagaatcatgccttgtcatggcatgagcactgtgtgctggcagatgcttactcaaacaaaatgaatgaaagccaaacaacgatatcccccagctatattcagtttatctccttaccacatttctctatcattttattttaaatttcaactacggtcaatcagaaatgtattgagtggttctttcaagaaggggactgtattagtccgttaggcagtgctgacaaagacatacccaagactgggtaatttatagagaaaaagaggtttaatggactcacagttccacgtggctggggaggcctcacaatcatggcagaaggcaaaaggcacattttacacggcggcagatgagacaatgaaagccaagagaaaggggaaaccccttataaaatcatcagatcctgtgagactgattcactaccaccagagcagtatggggaaaactgccccgatgattcaattatctcccactgggtccctcccacaacacataggaattatgggagctacaattcaagatgagatttgggtggggacacagccagaccatatcaggcactgagctgggtgtttgggtgtggaaaggcgtacggcctggacttggcttttgggggcttgggtccaactggaaaagctggctgtggacaaagaggtcatggaccttgtgaggcagagtacaccatgaaaacgtgggcgatcacgctgtccgtggctggagcagagcccctctgttggagtgaaggctttctgtgggttggcaggactgcactagctcctagctcctgggtggaagtgagcagacatcagtgaggaatcagagagccccagaagccccaatgcatgggtgtcattcacttagagaccttcactaagcatcaacacacctgtcacttggcagtttcaatgaatgctttccacatttcagagattccccaattaaggcagcagctagtaaagtgcattctttcctggggatcacttggcaggtgggtatcagaggctgaacgctgcattccatcgcgcctctagaccataggcttagcgattggatgatgttgtttttcccgggtgagttaggaattgaaggtctgagaaatgtatgtaattttggttgagttttgatatgggactccatggaatcacacagactaaatgtggttttgatacttgagaggacgcgggagtcaccctctagatgaaggaagctgcggcactttgctcatgtcatgtaaggtgcttggagtttcatttgataagcagatggattctctggtagtccctccagctactccacagcctcttaagggcggaactaggcctcctccaggcttgcctcctaatccgcagcacatggcttggcctgtggaatttgccaataaaatccgaaggactctcatcctgcctttcctttcactcactctgttgtggacacccataaacacagcttattccagctgcaaagcgtttcctcttgtggtccgccctgctgggaacacccctaccctgatcttcccatggacagctgtttcttgtcattttggcctaagctcacagagaattccctccctgatgcctttcctgataccaaatcaaaataatcctctaccactaccaccagtcttactctggcatatcatcctggagtttttcttcagaacaatcatctccatctgaagttatcccattcattatttggttatctgtgtatgggttgtcttccccaaagggactaaaaattccttgagaagagatatgctctgtcttgttagcagtgtctggcggatagaaggtgttcaataaatttgttgcatgaatgactgcaggaatgaaggcctgagatcacgtcttcttctccttggagtctgtgtcctttttcctgaattgtcttgtgttgtccttgccttgggcatgttacttcctcagtgtcatttctgactgggcagctgtgtgaggctgctcctgtggaggtgctggagacaggttacaaatacatagaagtcattgaacttgtgtctgtctgtccaggccacagatgaggtgtgttggttgtccattatttcatatttgcacccatgacacttaccttccttctgctgggtcacctccccacccagtccttaagtctttgaaggaacaatgatagtcaactccagggaaattagcattttcaaggtaaggagggacacagaaaagcactctgctcatcctttctctctgtttgtggagtctgctggcagtggttgtggtggtataactattgatccgttgtttatgagttcacccgttcagaatagcaatgctactcaggaggcctgtgctgctcccactgccctgccccctctcaggacccgccactgggcactcacctctgggcttgccaggcatccggctggtgtcctgtggctctgaggagcaggcacagatgggaccaaggagggaggctcctggaagcacattcagctgttgaggagccaaaaactaaaatgggaaaactaaaaactcaaccaaacatagggcagaaggggtaggagtatgccagttgtcactgaaagctagaggaggctacagggggccagctcagttctctaacacccctcatctaaaccgtaagtgctttgcagaaaaacgtctcctttctccctcttttaaatgcattgcgttcttgaatttgaaaggtttgcagagagctgggaggtcaaccacctggttttacagatagtggaagtagtgataatcagtcttgcgtaaggaggccttccagaagggtgagagggccggcagccagtacactttccatccccaggctgtgagccctcacttggggctatgcatgctgaaggaaaggccatgtttccctaagtgcaaaagcatcctcctgaccatgaatgctttcaatgcatttagctgacatttatcaccgtattctctcctgactgctggtttagtccgtaccacaccttgcgttcttatgctttgactctcattccatgtgggacagctgtttgctgtgggtcaggtcctgtgctgagcagtttaccagaagaacctcatttaatcctcacagatactccatcaggtggacacaatgattactctgattttacagagcaggaaaccaaagcgctgagaggcacagtgaaggtattttcccagctcacatactcaggtgggtgctgagcctgggactcaagatgggtggtgtctgactcctaggcaatccccctcggttccatagtactggtcttgttctgtcccttgtattcttcattgccaagttcctctcccactagagacccagtgagtttggttgtccctccttgtcgtggtgcacaggaatcccctctcctgaagcatgaggaacagggcctgggagtgtttaaggtttcatgtcatccatggcgtggagacacagggacccaaccgacctctagaggtcccttctactcacagaatcctgcaatttctatagtttgttcagaggaagactcttattccaggttcttccattgatctttggctttaggtatcagcaatcttggactttctcacctggagttagtaataccatgaacatttccacgtacttctctggaatgcagtattgaaccagtcaaggcagacaccaattctaggaggattctacaggccagtcagtggatctggatgccatagcaccaggggaacaagagggaccagctccaaaacgcttcctttttttttttttaaattagtaataggcatctctcctggggaatcttgtaaaaaaagataattaatggtaatggcatgtttgttctcttaggttgaaagtctccactgatgagtaaaatagaacatcgtccttgtgttatttaaggtcattttgcttcctcaggagtaagttgatgggttcccactgtgtaatagataactaatactaaataaataataagcaatactaccaacatcattatagatggtcaaatatttttaggaaaccaaggacttattgggtttaggatgcaatttcaaattgcatgtgtgagctgaagggagaaggaagcaacggggaagtttactaggagtacaatcattggagacaaacatctccaacacacaagaccttactgactcgtaggtaccaggaggggtaggctagaaagaagatagagtgggagacaggaatctacaaactctggctcaggcagtttgtttgattgcaggcaaaatttgtaatctctccaccctgcatttaaacaggaccgttattacccatctcacagtgttgttttaggttaaaatgagatgacacacacaaaacatagtatatagttataactttctttctctatatatgaatatatatgtacatatgcatgtgtgcatatatgtgtatataatatacacacatataccaattttcattataaactattgtagcttaaacactttggcagatataccatgtcttgcttctgaaagatccaattataggtggacaaatccccctttgtccacctataattgtgagtttttttgtggtgcctctcctacacatctgtttagagattcttcagtttcaaatcatttcttgagatgtttgatttctgagagggagcgagaagaaagatatttctttgtttttcgtaaaaagattgttgcatagcaggttgtgacagttcatggctctgaagatgcatttcccatcagaaaaattcatccagaaggttctgtggagcaggttttctgtgaattcatgcatagatttcggagtgccagaccccttttccttggagaaatgatttttccatgataattccagtggagtcaaatggtaaaaaacagggtctgggataacatgtgttggggaagaggtagtttaagactctcgcagctgtaatgttctctaattgtaagtcttctcttcattcatatctcctgatgattgggaggcaggctcagggcttgagtggtgatggtgaaaatagagaaggaggcttctttgcatttgggaattttacttttggtcaggtctagggcaacaccagtgcatctggcattagaaactgatctcagcattcactgatgggatcacaggaagagtcctgtccattttaacccaatgtcaaagggcttaaattagtttaaatgtagtgaactatgaatagccgtcttgatctttcatgatctgtttttcttaaatctcatttattcacattgttgaattatttggttttatttgggtgtatttgggcaacttgctgtcctatcagtgtgaaatgttttggcttagaaagcttttggggggttagatttgtcttataaaatgaacgtatgaactaatcttacaatcttgctgatggatttcttaaaataatagaatttttaatgaaaacagcatcaaccaacagactgatggaaaattaaaaaaactaaaattgaccttcaaacaagctttgttgggttcatggagtcaaaggaagatgtatctgtgtgaaaatagtttcttaatcttctgtgctttcaaacggcctctaatgtgctggatgagtgaaaaaaatgctctcacattcagaataatcatctttggacaaatttacctgtcaggagggctcaatccaaaattctaacccttcagaagctataagtaagaaaaagaacgcatgcgaattatttttaatttagtgcagtttttatacagaaaagctggaaatagcaatgctgtggtttacgggttgaattttgtcccatctccccaccataaaaaaattatattgatgtcctaacctccaatagcttacaatgtgactttatttgtaaatatggttgctacagatgtaattagctaaggtgaggtcatactagagtagagtgtgcctctaaaccaatataactggtgttctggtaaaaagatgcctatgtggagacacagaagacacgcagagagtgacaacaaaggcagaggctgtagtgatgcacccacaagccaagaaatgccacagattgccagcaagcagccaggaattaggaagaggcaatgagggaaacttccctacaagtttcaaagggagtatggccctgccaacacggtgatctccatgatttcagacttctgggctctagaactgtgagacaacacatttccactgttttcagcccccagttttgatactatattatgacagcagtaggatactggaacatttgcatattaaaaaaataattttgttaaataatagtaacaatcttgcaaaggatcgtagataggcctggttagatcacccagttcccagctgtgacacgagccactgcagtccacagaggaagtgccagagtccagaatgcttctgggtctcagtcgtgagcccagcctctccattacaaatcctaaagaagccaatcagggtggaaatgcttgcccttttattcctcagaggccatcagcacaaaccctattgtatcttctcagttatctcgaccacctgagaagtcacagacccccaaccccagggccatgcatcgttttctagattcatatcccaacatccaacagcccaacccagttacaaacctcttcctcatcctccaaacctttttactctctggacttaatgatctgtcaccagcaacatttttacatctccagtctctgctttgaatgttccccccttattattatttttttcttttttgctttagttgaaactcggctgttccctggattatttccactcctggagtcctcaaaagtggctgtttttctcccacaccttgcttaccctgaggcctgaaagttggataaacgtcctccttgctactcattatggctgctggacatttctttttcacctttctcgacatatccagttagggtgcagcaaatgccacttggctctgttgccctctgccccttccttgccgtgatcatctgccatcagttctgaccacgcttcttcactctggtcctccagaccgcacatcctgctgctcatctacagagccttttaatgatgacattcaaactgggtcctcccagccagtacccttgacgcaaggcccactggaccacggccagctactccatcctgcccttccctcagtctttctgatcttaggaactgcaaacctagtacatcctttatttttttcattctctcctgtgcttcatctaattcaccactaaattctgtttgtcttttcttttaagagttatcctgaatcagaccactttttaccatctcaagcactacctccgtgggcaaagccaccaccgtctctcctcggctcttctggtggcatcttgcctggtctccttgtttctactcctgttcccctggagtttattatctgcctggcagccccagctaccatttcacaagaattacctgactctgttcaaaacctacagtggcttctggctaaacttagaatgaaatgcaaacacctccatggagtagaggctttttaatcgcctggtgcctatgtaagcctcataccactgcccacgtcgctgctgcctcgctcgtgggaatgcagaacgctgaacttctctgctgttcctggaacttactaagactgttcttgacttaagaaatgttcttccctctctcaggatctgctataaacttatgggcctagaccttcgttgaattcatgcatctactccagtaccccgtttaaaaaaaaaaggctttacagatcatcctgtttgaaatagccatgtcctcagcccccatctttctatccctctacctagctttaactttcttcatggcctgtaacacctagagaagtctgttatttatgtatgtcttctgttatttatgtatttctcatttattgctactccccctaaaatgcaaggtccaccaagctgctgagtttattgctctcatttatagtgattacattactgcctgggacatgggatctattacaggatatttgttgagtgaatgaaacgtttgttaggaataatagtaagctattaatagtgaaattatttatcttttactagaaagaggaaactcaggtctgtctctgtattggcatgggattgggtgttattaaacagagttcagatagggtgtgcgtgagctggcgtgtttgttttctaggtcagagagtggaatgagacattgaggaggaaattgtcaggcaatgtgacacacttcataaaatctacacatgtggaatctaaagggcctttaaatatccacttttgcaaggggttttatggaaaatctaataaacactggagaataaggattattctgctcaaggcctacaaactttgggggaagggaaggaagtgaagtggcagctagaaatcaggctgtgagcctgaagtttcacgcgtcattcaatgtccaatctttcatgttaacctttctttattaagagaattgtaccttagcgctctagaggataatgattaagtgcagggtctggagcccgaccctcctcccatccccagtttcaaatgctggctcagccactgggtatatgacctttggcacatggattagccttgctgtgcctcagtttatcatcatttgaagggactaataataggggttccgggccagtgtgaagcgtgaagtactcagaacagtgcctggcactctgctcatacttggtgttagccttacatagctgaggaaggacctggcctgcagtgggcccgtggtgggcagagggcagggtgtacctctcgtgaccctggagctatgtgtggaaatgcacagtgcagggcacggagctgggggccgtggctgacactggtgcacactctacagttacacagacatctggtggtggggtggtttttgaaaagtatcaacgcagttcattgcttttggcatgtgacttgtggtctcggggccaaggtgacctggcttttagtcctggctctgtcccaacgcatcatgtggggctactaagaaaatgagcattcccaggcttcaggttcactctgtgaagtgagaatactgctctgtttcgttcttgagttttgaggaagagattactagctgctcaaatcatatataagtttttttatttttcccctgagcacaaactcagctgcctttcccagcctcttttgaatttagaggtgaccatgtgacagctctacccaaaggaatgtgagccgaagctctgtgtaggttggcccagaaaaacatcccctgtgaaattctttatgttctttcctttctccttagaccatctggatgttgatgtccaaaattaccttggaaacctgtgtcctgtttggcgagctccatcggccaaattcttgaatgacagcacagagcagggctcacacccccacccaccagctggccaggaaccttgttaaattattacctaaagaaaaaacaaacttgtattcaggcttctgagagttcagagatgatttgttacaatagctagcattatcctatctaattcaatactcaaccattataatttatattttctgatttcagctgcatagaaatatacagatgtagtttctgaatccagacctaagcacttattacaatttcttggcaagacttttggtgatttttgcatgtgtctgaaagtgagaaccatggccttttcaaacggaagtctcaaatgtttgattttcagttgcttgactgtttacatctgtggtccaagtaacatgtctgctttattctacaggaatgtgaaaaccagtgacaaggaaaagttttaccttgaggcaaatgagcacatatccataatggacttaactcaagacatgctataattggtgaaaatacctcttagatgataaattactcattaatggctggaggtcacttatttagtttaaccttttgtgccagaagtattctaatatccagtgttttaattgacacacactaaagagatagataggatgatttgtaggcttgttctcaaaaatgttaaagagaaagaagagaaaaccactattagagttccttttttttttctttcttttctctttttttttttttttttttttaacagggtctcgctctgtcacccaggctggagtgcagagatgcagtctcagctcactgcagcctcaacctccctgggctcaggttaccttcccacctcagcctcccaaatagctgggaccacaggtacatgccaccatgcccagctgatttttgtatttttttgagagacagggtttcaccatgttgccgaggaggtctcagactcctgggatcaagtgatctgcctgccttggcctgccaaagtgctgggattacagatagatgtaagccaccacacccagccagagttccaagccttgaagagaaaccaggtggtggagaaatcgtgtatggatttgggtaaaggagaaaggaagctgtggaaaggggaagaggctgagccagagttgtgggtaggagacgtacaaggaatggaggcaatgcagagacacggggcaagattcaggtgcctcgattccaccttttgtaattcaggggtcagggatcttgtcttacttttgttgttgctttggtatgctgcacagtgcctggcacataataggagctgaatgtatccttggagaatagatgcatgtgttttgctgtgttgcttcagtagtgcctactgtacatctcctatgagccaggagctgttctaggtgctaagttcctctcttgcagagtgatgtttagtgaaggagatgagggttgcaacttgtatggattagaaaaaaaaggcatcttctcctagcatgcaacttgcacagaccaagtaggagtaggcattcctcgctgacgatgttgttcactagagtccctggctgagtaaacagagtgccagctgcattattttgttaccttcttcagcccttgagcagcgcacaagctgcacaactgtacttagcaggaaccagctgtcggaaaacaaataagtaaacaaacaaacaacgcatcacatggtggaaagtattggggcaggaagtaaactgtaggttaggggacagagtaacctggtgtgcagggaggggtaggggcttgcacgatggtcaaggtggtgaactgtggggagagccatgcagggaatagcgtgctgggcagagtatcggcaagtggaatgacctagtcaaagacgagcaaggcaaggaggaggaagggtcaaagctgaataaggggcaggcagtcagcaaagggatctggggggtcctcggtgtctgtaagtgctctttccatgtcaagattaagctgtgaatgatgataggagcacagctctcaggagatgggaattaaataaaaatcccacataagcaagtagccccaacacctgtgtggattcacttgctgcgcacagaggcctggtagtttccgtgtggactttgtggatttgtggcaacccatatttgatgtgtcacccctgcagcacacacatccagccgcgaggatccggggttttctaactgaaatgtcatccttcttgggtccactcttgtcattttcacttatcacatctgcaagttataaacgtttaaaatgtgcatgatatccaatttgacgttttacctgttgccatttccaagatattacattgtgaaattaagctggcattttacgatcatgtatggatgtgtgtgtaagtataagtaggcacgtatttggaattaatggactcatagaaatcagagatggattaggcctaatgagctgttcagaagaattatttagcacatatttcatctctctattcagtaatcaaacctacacagtgtgtatgctaaggaagtgagatttttgcctttttaaaaaatttcttggattatctccatttgtggctgaaaatttaacattgcatcctagggcattttgcaccaactttattaagcattcagtctgacatttccctgcacctggggttgcctttgttatttaaaaagtagttgctttcctagttaccattaatatataattagtagttggtgctgggctccaagcaccacaccaggatcctggcctggccttggagccattgtcaaaaacaaaatcttgcccaagtctctaggaagacttggagagttaagcctagatgggaagtgtatatattttgtttgaatttttatccacagtaaatggatgcagctttgtcttttcacctaaggcctatggtcaccttcctctggaagccacatgcacttgactgttgccactttggcttctgctgattcctttaagcacacagtttcaacagactttcaaaatactattcacaacatggggttccgtacttactaacaggaagaaggaaagcaaatgtgggatacttgatagtgtagaaggacacttgatacccagagaaggatttcattgacactgttacagagacataaaatcacagagccctgtggtagcatcagagatggggtcacacatagtcagctcccaatagccaggagtctaccctatgaattttctttacagcatggctagatacagtatatacatatttatcctaaacatatatactcaacttataagtctgcatgaaacatgtgaattgagaatatgttctatattgggaacaaaggattctggtgttgggaaaaacttaagctgggacttaatttgagctgtaaaattattaacctaatctctctgagcctttgttttttttttaatctgtgaaatggggctaaattatatcttaatacctacctgacagagttgttacaaaaatcatcaccataatattaataataacaacagaaaccaacatcggtagaagcacttaatgagaacctatgcttacatgataaatgctttacaagggttacccaatggtctaccctgtgaattttctttacagcatggctagatacttataatacttatcgtaagtatttttaataattacattaagacaagatataaattcttaaggattgtacctggcatatatgaggcactaaacaagttatttcatattgttaatacattccattagcaaaaacaagttaaaatgcttaggcatgtatagaggatgctggaagacgttctggctgttgccagaatctccagacacaaaccttttctgtggtctcccgtctgtgttttgtcccactacaaactctgtttgttttctgtggtctcccgtctgtgttttgtcccactgcaaactgtttgttttctatggtctcccgtctgtgttttgtcccactgcaaactctgtttgttttctgtggtctcccgtctgtgttttgtcccactgcaaactctgtttgttttctgtggtctcccgtctgtgttttgtcccactgcaaactctgtttgttttctgtggtctcccgtctgtgttttgtcccactgcaaactgtttgttttctgtggtctcccgtctgtgttttgtcccactgcaaactctgaactcaccattccccatggcttgcttagcctggttgcattttccacctccttctccctgactctttctcaaccacccacccctcagcaagtcaggtgaaaatcctgcaaacagcatcattctcaccctttccttcattttttcaatcagtacaaacctcttgttttctcatgttcccatagtgtgtagtttagaatcattcaattatttcttcaggaaagaaagtgttccacatctgctgagtgcctaacaccgttctagaccctgagactcgagaagacaatgaagaagtaagtggccgcacaatgcaatgtccggtagtgctgaatgctctgaagaggagagcggcagccagggagggaaaggaggaagtgtgcgagtttagactccctggttaggggaaggccctcctacgcaggccttgagtgagatctgatgaatgagggcgtgagcctgcccacatttaggagagaggtttccgaggcagatacaaaggtgctgaggagggatcatccttggcctgaaccaacgggggggcacatgtgggcggggcctggtccaagccacaggccttggtgatggctttggattttattcttcgtcttatgggaagcccctggagcagtttgacagtttgagctgctgcatgttagcagttttttttttttaattttttatttttctgtaacttattgcccttataaaaactttccgttttttttgtatacggcaaaggctgtattttctttgcgtttttgtgttagagacaggacacagccctcgtgtagaacctcctctgcactcccacaattccctgtgccacgtccattgttttaagcacttaactgtgatacaggacaaagctcatttctgcagacttcctctttttttttggttcacactgattcacaaagtaagacgccacttccaatggtcatatcgtgaaggtttcctcgaaggatcgtgaaattccacgaagtccgcttgctttcctgggtgaataaacaccaggccgctccctggactttccttgtcgtttgtgatcaaaggctcagctacctcgtgctcatggtcctgcgatggctgaaatccgtgaaatgtccagaaagaatgatttgtcatgaatgcatcagcaaagaggctataagcttctattcttattttcttatctacttttaaacactttttcattgctttaaaaaagtatataattactgttcatttggtgttgatgttattgccttgctcggtgttgggggttgtttaaccattcagtgtacaccagtgactttttggtctgtatttcccaacaattacactgagttgcagagaaaatattaattaaacatacttctattttaaaaggcaataataatatataattcccattagaaatgcatttgaaacttttctattaactctttactgttgtcaccaaagccttcccttctagacagtggaagtgagtgggacaggtggccatatatggtttgagcaggtgggcagaggaagaatgcagggtacttgttgccctctggttggtcctccttcctccatgcttattttcaaccttctggcccctcacactgggcccaactcatgccctgcactcggcaaatgtttaatgaaatgcttcctcgaggagcacaatattttatgtgtacagggagccgaatgcatattattgcatagtattttccttttgttatgaaatattttatataccagcatgtgcataatatatctatgtataaaaacataatacattgatcacctgtgttctcttggcacaatctaagaaatagaaccttctattacctgtgaaagtttctgcactcccacctattctctaccctttcttgcttgaggagatcaccactggcctgaatttttgtttatttcctcctttcctttagacttttaccaaatatataattattctcaaacaacatattgtctagtttttcttgttcttccctccaaatagaaagaaattttatgtattctccttcaaatgtttttcatttgatgttatgcattttctaataatttaaaattaacgtagtcctgaatgtgaacaaaggcagagctctaactcagtcatttcaggtaattaactggtctacaacccatcagtcagaagtgctttgatgctctttgactgtgtgtgtgtgagtacacaaaacacctgctaaaatattaaataaaagcagaaaggctttgacatcaacatagtagtgttcataacgtttctgcgtagtggaattgcgagtgacatagattttttgtgttttctctaattattaaattaaaaaattaaattttggattttcataaccagataggattagtgtcataaaaataggttcctaggccaggtgtggtggcttacatctgtaatcccagcactttgggaggctgaggtgggtggatcacttgagcctagagttcaggaccagcctgggcaaaaccctgtctctatacaaaatacaaaaattagctgggcatggtggtatgcgcttgtggtcccagctactggagaggctgagacaggaagattgcttgagcccaggaggtcgaggctacagtgaaccgagatggcgccactgcagtccagcctgggctacagaacaagacagtgcctcaaaaaaaaaaataataataataatatatacgtgtgtgtgtgtgtgtgtgtgtgtgtgtgtgtgtgtatgtgtgtgtgttccttttgaccacacactgatttgtttaggccatggggctttttgcacacacatccccatgtgtagggcgttgcactaggtgatgtttgggctacagaaataaataagacacagttcctgtcttccacatgcccatgacctggctaggaatggggagcttcagaagcaagacctcaggaggtgactgagaaggagccactgctggtctagaaggccaccttgtaatctggcatgtggtggggggtggtgcaggagcacagaagggacactggcggttttggggagaagtggtggcgggaaggggcctgcatctatgagggccagggcggctgtgccatggcagccaaaatacaatagggaactggagcagcaagaggccaccagctacagctgacgcatttctggcgggagagaggacctcagagttgtgcgtggccttcacgagtctttcccaccacggcggtgcctcgatctgtttccagctaagcccagagcagccagggctgtcagaaccaggaagactgataagcgtgtctctggatggcaacgtcaggttcaattttattcagcaagtatccactccatgccaaccatgtgccaggcactgttctaggctttgtggaatccagtagttgtcaaacataataaaatccctgtcctcacagcacttccctcctggtggaatgagacagtgaacaaaatacatacaaaacatagaataaattaactggtgacacatgctgtggagtggggcgggtcgatgggaaaggaagatgaagcctatgattccaagtaggatgtctagaacaagaataatcccttgcttatcggtatagtttaaattgtcaacaaaaacatgcattattttgacataagaagaaacatcaggaaaaaggtaaagaccacagtttattgcaatatatgcttttttcaacatttgaggaaaagagattgtacatgctgtattggaaatacgttttagtgtctaaaacggtgcagagccagaatgttgatcttcatttatcaccccaattcttcctggatcttaattgccccttcagaaagaataaaaaatggaagcacttcatccagcttctgcacagaaagcctgtctctgatcagcagacaaggaataggagatgatgctgatggtggtgatgatttataccttaatgagcaggcgttggtcatcagtatgtgctgaaaagggattcgctccctgcccacaggggactttccagatgctgctgagctgggcctgagctgcaggaggtacagaggctggttggaacagccgatccttggggcatcttttaggccaagggcctttggaaccgaattgagtggagcaatttaactgcccgggacacacaaagcctcttaaaagcaatggccggtgaataagccagaagccataaatagataaagtaacaagcaaataatgggattaataaatagacaggggagcagagccagggctgtgagctgagcgccactagatcaagaaatgtcagcttttctctcagcttttcctccacagcgccaactgtcagtaatttaactaacattttgtaaataaatgtggcactcggacagctgtcaacgtgcctgctatgaacactccttttgtcactaaaagctggcagtgacgctgtttctcctgcaagtgcagccagcactgccaattggctcctggtcctgggactgtcagggagtgcgtggggccctggggcagggaggtgggtgcctgccctagagacctcactcccctacacccgcaggcatcacctgggctcagctctttctggtgcacttggccggtttgtaaggtgcttccatcaaaaatgagactattgttttccaaacaccttgtgtttcagctgggagttccatgtgcctgaccatctagtttccccgccaaggatttgctctttctaaataagacattcatttatctaggttaaaggtacgaaacgcactgttttccactctagctgctgggtgattatttaaggttatgcagtcagtttccttgtgctgtggtttgctcctgaacttgaaactaatggctctggactgtgccttaggtctcccaggtttaatcacaaagttttattaagttagtgctttagtgtcctcttcctggaaagactctatctcaaagcttcttaacctatacccaagcagaataaggagaggaagaatctgtcttaatatcaaagtcccgtgggcgatgaatttgggttattgaaatagatgaaatctagcttggtgaggaaaagcgtgaactgggtaattaagtagtcagaaatatatttaataataatataaattctagtgggcatttactgaactctttttttctggggggggatgttgttttacaaagtgccctacatattacctcctttaacactcagagccccgtgaccatcccaattttaaaaatgagggtctgagatgcagagacgtggaggagtctttatgaccagcgtgtggctgaatggggatttgatcccagacagtttaggccctttgatcccaaggtcctgtgttctaaacaacagcactggtcttttttatgtatagttaccatgtgcacggggtatacaattactgatttttaagaagcaagaacacaataaaatgaactccatacataaatgaaggaagcatctttgacctttttttcctggtgaatgagaaggctctttattgtattgtggtaacccattgagaacgttattccctagagcgtatcacagagtaatatatggagaatacaaataaatgattaagtgaatgggctctgcagtcagctgagaagtttacttagcttcagaggcagaatagtagaagtaattaataggaactaccttgttgggatgttttgaggattaattataatcatataaagtctttacagtgcctgacacagggtaaatattcattcattcattcattcattgaaatttttattatgtgcatgtgatgtatcatggattctgcagtgaatgagagagacatgatgtattcttggagcttatggtcttgtgagaggagatagtaacaaacaaggtaacatatacaaacatcccaggtaggggaaagtgctgtgacggaggctgcctgggtggctggtgggctagtggatgtctctctgagaggaagtgacatttgagctgagatgtcaatggagagaaggagctggcccagcaaggatctgagagcaggacaccgcagggagcaagtgtccggtgctggagggagagaagagagacccctgtgtgtgcagcagcatagacaatggggagaggtggagcagacagacctgcagggtctgtaagccaggccacaggtagggatctcttttcattgtgcaagaggaggtcatcagagtgtttccaatggagcagtgacatgctccgagcctctgggtgacaacaggacgctgctgcctggcctcttggagactggcttataagcctcagaagtggacactgcagtattcaggtgagggatagtggaagatttggcaatgatggaggcagtaacaattgagagatagtcacagataggtttgctggtgaagcagactaagctgatggggttgataagttaatatggagggtgttactgactgcagtgcttatattctcggctaccttaaagtaacagagtaacggtggttttgttgtattagtgttattggggtatttacataatgaactatttacagcttgagaagtactcagagatttctttgccacattactactttgaattaaacatggacaacctatttgggaaagcatcactagccacctgccctacttaacactgattcagaatgtcgggctttttgtttttacttccttttcctacttcacttatgagatcgggattgatttcttgtgtttattagtcataaatatttgtcctaaaaaccagttttgggccacttccatgtccaaagttccctggtggagttatgttggaattggagggttacatgcatgagtgtgcacgcatgtgtgctgaccacagataattagggttaagagaagggtgtcatgaggataggtgggggagggaaggggagggttccctggcctgttttatcagatttcctctgcagctctccttcttactgcaagggccaggtacaatttatgttgcctgatttcctcatccatagaatgatatatttttaattaggacctctttcactagtctccttacctgtagaattttagatcaaaattacagaagaatctgtcctaggttcacaccctgtctcatgtagaacaaagaacaagaacaggcagaggaagacagtggcaaatctcactttttaataaaatagtggcattcaccatcattaatactgatactttgttcttagcttaaatcagcattaaagtaccagcattgtaattttgctcagttattgcaataactaagagtgataaaaagaggggaatcatggaaattttatatatatatgcataaaaatggattcttaaatatctcatcaactcctaagaatatcaatataaaaattggtgttgagagtgatggtcgagagacagcaacattttaaaacatgcaaaatcacattcagcattctcagtctctcaaggtattcaagtgagccatatgttttaagcaacttgtcattaacgttggttaaaattaaaataataagtttgaacatacaggattaaacttcagtttatcttggaattcatttctatcctatattgcattcctctatataataccagaagatggaggtattactgtaagacacatgtcttttgtccgtcctaaattttgagagccttctgtggaagtgctgttttctcccatgcctttttatcaagccttgggcatcactaaattctgggttaccaaaccactggccaaaaggaacttgttgctgagtggtataatggacattggagactcagaaggagggtgggtaggaggtgagggttggaaaactacctaatggatacaatgtatactacttgagtgatgggtgcatgaaaatcctagacttcatcactataaaattcatctgtgtaaccaaaaacaacttgtacctccaaagctattgaaataaaaacaattttttaaaaaactacgcacatgcatacacacacaaacacacacaaacaaagggaactggtttccaagatcagccactgttctggggaaaaaattctcactatgatacgtcaatggatggaactgaggcagacacagaacttactctgtattaacagcagggttatcaatcacttactatgtatcaggcactgctccaagtgcttatgtgcatctcataacaactctaggaggtagattctgttattattctgtgacgggtgatgtaactgagaacagttaaataacatattcaagcaaactgcttagcaaagagtcaagcgcagttttctattcagtcccaaaggtaagctttatcttaggtccaaagaaaaaggtgccacccacctactattttaactctttaggtttcagctatgaaaatgtgaagaaaggaagcaggagggaaattattccctgtctgtattgtgtatcaaaaacgtctactcttttatttctgcagaaacagaagttctgcgttttcactcaggagtagagtcagcagtttatgtgtgttttcttaataccctcttagcagttaattattccttttaataaatgcaatgaaaaagaactgttattggagtcatactttagttgaattagtaatttattctagctcttaatgtttgttaatattctgtgtattgcttcttgttctattagacagatatgacagggaggtaaaacgtgagctcacacaggagttgtgtgggtggaagtctctgggcgatgcatgggccactgacaggtattggtgggtgggggtacatgttgtagagagaggcctggagatgcagcgatgccttctcattactgcaaaagtgactgaagtcgtatggacaatttcttggtcagaggtgaatgaaatagcaaagtctttcatataccacataaaaattttcatctgaaagtgacttctggaatcattaagcctcttcccatttctctagttacagactgatctaagcacaggtgtattctacacttaatgcctcggtaatctggttctgggtctaactctagcgataaattataattttttacttctagtagaaatttacatagttttccatttagaaagctggccccatgttagaattataataaagggcaggaggtatggattaatgttattttgtagggcatgttcagcaaagtgtctcaaagggcgggtaaaaaatgagattctttctttaggttgcacgtagcaagtcctctgaacttgagtgcctttttggtgagattactgagccaagcctgaaaataatgtcgtttgctatgtctggatcctaataggcatgctcttaattaatttaactattacccatcatttgttcattccttcagtcatttctctaacacgtatcgggtgcttactacgcactggacaggattgtaagtggtcagggtacacaggtcacccagaaaaggtccttgccctcatggaagtcaccttttagtgggaaaagcagatgataaacatataattacacaaggaagcttttgacgacaagggtgggaagaaaaggacaggtgatgtgatggaaagtaactggagtgtgttggtcaggaaaggactgtggagacgggaacagtggacctgagccccgggggatgggcaggaggcagccatgcacagagcctgagaggaagcacagaattctaatgagagggaaaacaagtatgaagctgtgtggctgaaaccgtcttggcaagttagggaaagaaaacggaagtcactggggctgatcacagtgctaagcatgagagcactgcaagatgaggtcacggaggtgggcagggaccggcttgtgccaggccttgctggcagggtgaagagtttgccttttctctgcgtacaatggaaaggagaagaggttttaagcaagagaatggcttggtcatgtgtatgtctttgagacaccctggctagtctatgtatgatgcaaaaggtgggtggggcagggtgacaagaaaatactgttccggagcttcctgtggctgtgcctataagaggtggtggtggtggtgtggaaggaggtgtggcagtgaataaacagagatgtagaaacagcgtgtacatatattttaaggaacactgaggacgtgatgctggaatttgtgatgagagagtggaaaaaatccaggatgacttccaagagctgactcaagcacctgttgggttatgattcttttaacccatgtagagagactggtggagtaggtgggaaggagagaaatgagggagcaagaggacccttagatacactaagtttatgatgtttgtttagcatcaagaagagtttgcagatggatttatgattgcaaagctcgggaaagagatgagacttggggatttaagtatgggagagatcagcttatatttgttcttaaaatcttgaaattgggtaaaatcaccaagataaggagaaattgtagctagagaggagaatggcggatcggagtcctgagcttttgcaatatttaaaggttggagggaaaaggagcagagaattggcagccaatgaggtaggaagcaacccagggagagtttgagaccaaaaaatacaagagaatgaaatattttatggagacagtgaccgattttgtggaatgctgccacaaccaggagttctggaaaaggagaagtgaaaagtatccatgggactggataagatgatagcttgaggattttggcaagagaggtttcaggagaatagtagagaagggaagaaaaaaagatggtagtaattggagaggtaaatcaagtcaaaataattggtgtgtgtgtgcatacgttcagacccacattatctagtgcatgactgcatacagatgagaaagttccatctcatctgtgcagatggagggagtatggcgctggagagcagaggtgagaggtagagtacaagcagagggctggcacacctttggtgtgaagggatttctgttgcttgttttgtaaatctttcttctcttaatactcctgattcttgcaagctgctcatctggaacaatctggttacatatttttatgaattttccaacaggacagttgagagcatgaggaatttaccaaatgaagaagtggattttcaagattcttcttttacccccttgaatgatgttatgctctgtgtacagaggggcaaattaggagagtagcaaggagggatgccaaattggagtaggagggatatgaggcagtgacagtggatgtgtgaggataatagaaagtttgatttgaggaaacctcaccgtgggctacttcattacccttaagacttttagttgtgtgttctctcttgtctaagtagttctgctctagaggttcaagctgaacccagaaggaaaagaaacctatttgaaactgtgtaaaacacctcccttcagagagcttttctcactgtttttagtctcactgaagatgatcccagtatgggatgacgattctgcagagatctggcttgtctttacattacatctctaacctggagagtcttgctggatgtttccccaggattgtggtttcttatatttactcctgatctaatgcaaagcaccacgtgcaacttatgtacagttccacgactaaataatacaatggaatcaccacaaaatattatcagctcctcccaggcctctggttgttgaggaagaaaagtgggtggtgcttgttggagataaaacaagacgttagtgggtatacattgtgagataaatacatatgtattttaaagtttactggagggtatctgtatttacttggttttccccagtgttttacagatggtgcaaagtatacaaacatgcacaatgtacatatgactgcctgtcttagcagacaataccttatagacatatagacatagtccagttaacctgagctagagactcttaccttacaaatgattgtcccaaagcgttcagtaatgttttcttattttatctctttaagcaatactaagtgacttttgggatgagactgtcttttatctgaatctaggtttatggaatatttgaatatctgataccagacatggggatccacctctctttgtgcccagccaatattcagtgcagaaggggatttgtcactgaatctggcatgttgccctaacattactacaagcctgaattttgataattatcgcaattatttaagtaaatggattaaccttgctttgacaacatagtttatgagctgatacagtgtctttaaatagcatttcttaatacgggtgcaaatgataaaatttatcaaagtaaacccctgcatgaaaggtttcctcttcgatgattctgctgactggaagagcaggtccccatggcagtgcgcatagggcacgtggaggggttaaaggggagagggaagatattctcgagggtaatgagatgacaggcacattgtacaatttctcacacatctaatttatatctacataattttaaaaatgggcagtaacttataagtctgattcaatgccacttattagctgacatttttcaatattgtgtttgtgtggctctattttctaagagcaacagagtagaaacctgttatcctatatcatttctctgagtgggaattaaaagcctggagttgcatcctgggcttctgttcccttctctgccatccctgccccagccaccacccttttggggagagttagaataccatcagcaaaagagccatggggatatggattcaaatcctgtccatagcagggtgtggccatgtgaccttgggcaagttacttaattacttagctccttacttctgtgtagtgtcttacaagtgacaaagcatttcctcatattctctgtgcttgtctgtctctcccctggaactttaagcacctggaaggcagggtgtatgtctttgatctctgtatctccagtgcagaacactgtggaacaaaaacagggtaaatgaacgatagaactttgtttgactcctaccacaagcccgtgaggtgtcaggaagattgggataaccttgtaaagcacctaacacagctcagtaaaaatggactcttgttattattgggtaacagatattattcacttggagagataaaaacaaaaccaaaacactaaataatgggcttggctctcaacccaattcttctgtttccactctacttcattgccctttagtctaggtgaggtgtagatccattctaatgggcaggtgttttctgcataatcatccatattaaagaacacacttacagttatggaacatcatctcatattatctaactcatttttctttctttgcttgcttccttttcctcttttcttctcctcccttctggagatatttattgattatccatttaatgccagagttttgttaggtgctggggatttaaaaaaatgaataaaatgaaagaagttgtcatatcacaggaagatgggcatttaaacagccagctgtaaagtaaatggaacatgatgtggcagaagcaggtaaaactgctatgcaaaagcagagagagagtggattagtagggccagctgctgtaataacaacccctaaatccctgcaaactaacacaacacatattaattcttacttgtgcaatgtccatgcatagagtggttctcctgcatgacttcttccaggggatgatttggggacttggactcccttcttcctgtgatccatattgcagtccttactttgatgcaagtgggcagaggagagtagagagtgatgtagtatcttttggggccagtcctggaagcagcacctagaactgccatgatttcccatctggaagcaagggggctgggaaaggcaccctttctctgggcctggaaggggaatgatggtggtttggtggacacataacattgtctctgcacagggaacagctatttctatatgaaaagtctgtggatccaggaagatgatgcagaaggggggccatttgtctcagctcttcaagaatgcatagagtttaggctgggtgtggtggcttatgcttgtaatcccaaaattttgggaggccgaggtggatggatcgtttgaggtcaggagtttgagaccagcctggcccacatggtgaaaccccatctctactaaaaacgcaaaaattagctgggcatggtgacacgtgtctgtaaccccagctactcgggaggctgaggcaggagaatcacttgagcctggaaggtggaggttgtggtgggccgagatctggccaccgcactccagtcgggtcaagagagtgagaccctgtctcaaaaaaaaaaaaaaatgcgtagagtttagccatgtggggctaccgcagggcattcctggcagagagactaaaagctaggcatgcaactctgggtttttggaatccagtcaaggtgttggagtcgtcaagtggaagaggcatctgcagcagcctagcatgttcactgtggccttctggcctcttctcacctcccctttccaccatctacttggtgttgagttgcttatcagtttggtttctcagtctccagtctcctgtgcttgcagaggccgcatctccactaaggaagctctcttgctaccatgccccttcccctggctggtgtggactcaatttccaggctcactcacatggaaactgcacccaagtcatcaactctgggctggtgacacaacaaagaatgggtggctagaggtcagtcccagagccggctctgctgccctgcagcacccagttgggagggcccagtaacctgtgctgcaacaaaccttcggatggttctaatgcagctagtttacgagtcaccacttttccctgtttctcttttctgagtccaccctccaggtgtctgattccatcagtctgggttggcgccctgccagagtgaaagagaccagtggggcaggtgtacaggctgtcacttctacttctccggctcgttttttcccttcactctctgagcacctaccctcagttccacctatcacttttcccagctagttggcccaagcatggataaagaattttagaaatgcaactttccttttttttgtctctctctgtaggtgccagttctgtcattagaaatgtcttgccaaattagaacacaaataagccaagaatattcttcaaaatgcagataatcaaaagcacagcactggaatctgatcatcccccacacatccatggtgacagcccgagttgctctcttagagcctggcagacattctaattccaactcacatttttctaaaaggaaaaaaaaaaatacctgttaggctgatattccttaaagaagagtctttcttagagaactttataaaagccatatttgggcgttatttgtatgtgaaaattgtgctctttctgctcataaacttttctgaaacattttttttttcttttctgtgagagcttagaaaacggctagtaatttgaagacaacctatgtgacactgatatgcttttggtagcagataaatgccactggctggtgcaaagacaatttgcttggaaaatgtgaagtgctttatatctagaaatactaggtacagagtaaaattctccatttgttaaaatcagacactgacttgcagtagtgagttatgtgctgggctttattaatccttctgctcatattgctttagacataggagacagcggcgctgattagtggtgagctcttgatgaactatatttgggaggccccagttttgcaggagggggctcaggcaggtcactgcttcatgcacaaaacatagggaacacaagcagcagtttggatgtccacagctcatctcagccttgcttccacatgaggaacaatgatatcagcatgtaatctcagcattttgcccttgaaataaaattctgcccgccattgatatccagtagctcactcctcactaattcaaaataggtcccagtggattggcatcccctccatctgaattgcaacatgcacttcatctcctcctgtttaaaatgaggatgagcatgcttagagtgtttaagagttggaagctgcttcaggggtaggtatttgtagtttcatgaattatttatttaagcaaatgtgtacagcacatttatgtgttggagtatatgcctgatcacactcaaaggggtgtcgtggaaatgtatcatgccacggcatcaccattttgacatgtgtagtgcggagaaccaaaacactgctcctgggatagaacaggattagttcagtttggaatcatttggctctcatgatgcaagactaagtaaatgcgttttatcatcttccctgttgtgtaaggataaaacccagcctggatctatttgggcttcatgcctggagttttgaactaaacacagtcccattggtgtgtagtcagatttcattgtttttggttttgttttattttcccctttcaccaagcacaaatccggaaaaaaagcagtatgtgcattaaaggtttgcggtattttccttatagggcgattcacaaaattgcataagtcaagtccaatttttagctatttgtgtaaaacaaacagaggctgtctttccctatttccttagcatctcctgtctcacgcacacacacatagcaagaggtctgctgtagcacttaacggtgcattcaggggtttaatttgaagcagtgcaggaagtgagatgcctgaactccacagcgctctcatatctgggcatacacagccttgcgtcaacctggaaccctttatcccactgggtgtggttagcagcaccttcttgacttgctggtgggcacctccttgactttttttctggtccacttgaggttaaaagttgaggcggggtgaatctagaatgagcccctaacacatgtaagcctatacccttctctgaaaatagcaaaaagtgaaatatccaaactaacaggttaaccaggttcaatatttacctaaaattgccaacatttcaaaaatcatttaagaaaataacccaaataactcatcagccagccagtatttgttaagaagaaaggacaaattgcatacttgttaatttccctgtggggtagtctcagaactgtgcagtgacctctcgctgacattcctgcacctttactgatatgctcccaaagtctcacttagaagagtgaatataattgctcactctgatggctccattcaggaatcttcaggagacacaagtattaaaatgaatagatggcgtctggcaaatctcttcctgccagcgataagcaatcttgtctattaaatgtctcccagtgcaggcggatagtatattccatgcctggtccgtagcagggtgcaggctgatggattgaatgtatctatacattgtatacagctaatgaactggggttagttacataagaggaagattgatagaacccagaagttatagccagattcagtccagaaggagaatgagaaagcgatcccggaaatctgggtaaagggggagataaatcaggtgggtagacgttataaacaggcctgggaagctgggtcatgcaggcagtgggagactcgcgggagactgggagatggggagacgtgggggaatggactgctgatgactgcttcctgcctttcctccttagcacacttgggctggacagacatatgtgctttttaaacaagaatctttctgaaacctggaagcattagtctaaaaagatgtcagacaccttctggtacccttattttagagaggagaatgcacctaaggcacatacattgccacaaggtcaaataggccatttcctgatctttgccgctctcaaaataaaaagaaaatgtaaaacatatatgcaattgttaagacaaaataaaaaggagagaaagagaaggaactgtgcctgttgctaaaagctagagttcagtgttttaagaaatagaatggaaaagtttccttgaagagaactttatctttcttctccagaggagtccacaggttgtcatggattttacattcatctctaaccctacacaatgcacacaatatgaatcttcacaaatgaaatatgttccatatattgatctgtgatttcttttctctacagatagtatatcaacaatatgctcccatgtctgtatgtataaattaaccttgtttcttttacctagaagaataatactctattttgtaaggttccataacatatttcactagttccttataaatttatgtgcatattatttctaattcttcttctctgtcaaacaggctaccatgagtatcttcatgtatacaggaaagtgcctctgaaagcaaattcttggctacagagttactaggactaatggtatacaaattaaaagcttatgaaatattgaaaattacctaatataaaggttattggaaggtacaatggaatggaatgtacatggatctgtacagacatttccagaaaagctggtgagtagtggggtgtttctaaaatgtgacatttgccacactggtagttaaaaaatgtctaatttatatatatttaattatgaagtttagcatcttttcatataggttccatgcagctggccagaaaaaggcccccttcctttgcatgatggtggtcttgacttgtttaccatgatgccttcttacattgtgttctccgtacctggtattgagggactgggtttatcttcccacctgatgctacttatcctctgcattatgtgtgagataacttctggaccgcttcaggaaccctccctgcctgtggagtcatctactctaattgtccgggagttctgcacccctgccagaccctcccctccccgggactgtcttcctgtctttatgaaatcccagcacctacagagaaccaggcacatagaaacactcagaaagtggttggtgtaagaaggaagaaaggaaggcagggaggtgggtgcagggatgatacacgctggtatgaaacattcacagtgaatagaacatctgtaagacacagggccctggggtctgtccatggaattcatttttttcaatttatttagtgccttagccctcaggggccttgtttcctcacatggaagccagtcagttacgtatatgggggtggctaacatcccagttaataacagtgatgttggcttcagtcagatctgaatgtgagtgatggtgttctctcctagggttttgtgattagtttaatttacttaagcctgaatgtttcctcctgagattagtatgaggtttagatgatacaatatattgaaagcacttgatgcagagcctaatgtaagtaagcacacaataaccattggctgctatgagtagtacttattattagtagtagtagtatgattatttttattatcaaatggtaagatggtccatgcaatgctatctttgtccataaggccattggtgcccatgatgagcaagttattgtaatagaaattaagctcaattggccgggtgcagtggctcacgcctgtaatcccagcactttgggaggccgaggtgggctgatcacgaggtcaggagatcgatactatcctggctaacacagtgaaaccccgtctctactaaaaatataaaaaaaaaattagccaggcgtggtggtgggtgcctgtagtccccgctacttgggaggctgaggcaggagaatggtgtgaacctgggaggcggagcttgcagtgagccgagatcacgccactgcactccagcctgggtgacacagtgagactccatctcaaaaaaaacaaaaaaacaaaaaaacaaaaaaaagaagtgaagcccaatcattatcacatccaaaggcttattttgggggaactgccaacacttagcccttctcatttactgaatcggtggtgctcctctggtgatagaggcttgttcacagaggggagagtgttcctcaaagctgacctgctttgcttctaggaggagtgattgcttgtcctaaaatcagtgtgtccggttcagccctttagccacagggcttttgtacttgctgttctctctgcctggaaaggccatcctcatggtatctcaagggcttcttttcttacttctttcaagatggcaacatagcagaggcgtccatgctggcaactgatataaaatggccccaccgccccagtgctaggcaatctttagcactcaatgccctgagaaatgtccatatatttttaggtttgtaaaactttattttattgtggtcagattacctaacatgagatctgccttcttaaaacattttaaagtctacaatacagtaccgttaattctaggaacattgttgtgtagctgctctgtagagtgtatcttgcataattgagactttatgcccatttgacagcaactccacgtttctccctccctccagcctccgggagacaccattctacggtgactctacgtgtttgagtatttgggatacagcgtgtaagtggaatcgtgcagtgttttcccttctgtgactgacttatttcacctagtgtgatgtcctccaggttcatccgtgtcgtcacatatggcagatttctttctcagttaagactgaattgtgtgtatattgcatactgttacatgcattagtgtatattactgcgttttctttaatcattcatctattgattgacatttaggttgtttacacatcttggctattgtgactagtggtgcaatgagcatgggcgtgctaatatgttatgtacatttattgtttacctattgatttccaattgttcctcactaaaacctaagctcataaaggtggaagctttgttttgttcactgatcctgtgtcttcagaatctagaacagcacactgacctagactctaatcccagtacctgtttctttgttcttatttactagaataaaaagcaatctcagttgagttttaggcgttgcacaaagagaaacttccagcatgattggagacatcattgtctctggcacccttggggattcggggtcttgtgttgggtccaccttgagtactggccctatacctagaacagtgacccacattcccagggtctccaaggtccatcctcctgagtcacgaaaaatgtcctgtatggccaaagtcacttgtaagcctgtttttatttgaatgtcccggcccactccagctagtgctgtcagcttttcaggtccttttcagaagtcctgggagggtagaaagctctgtgctgatgttggatggacatttcctcttccttctaatgccccaaactcctatccattcatcctattgagactctcctagctactcacacttttctcttctgacactttgcacacttactagtatttactatttataattattctgttattgttttccttaccaaaatgaaggatgcttctctgttttgtttccttccctatcttgactaccttggtgcttgaccatattcagtgaatatttcttgaacattattggtggattgactttgtttcctctccccttccacaccacatcccagtagtggtacaatgggaatcccagactttaaatctgtcttcagtgccacttgcctgggttgccctagaggcctcctgtttttcatttttcctttgccctgcaatgtatggcaggtgacccagaagggtcccagaaggatgctcctgaagtttggcccacaacaccttcctgcttttccactgcacacaggtctttgcagactaataacacgtggattcccttgcctggttttctgggcatccagcatactggcttcaacttttctttccatcttacctccactatctctgtcctcttgcttctgccaagccaggcagttcacctgcctcacctataccctggcttttctctcgtacactttgttcactcagtactctctgtctcggaagcccactcactcccctttcaccctcatccttcctttgcacgtttaggtcctacataagctgaaaaagaacagagtctggtcaaatcttgactccgcttggccaatggatggtacttctcttagcctccgtttactaaaatgttaagggggaggagataatggcacctaccttatcaggatactgtgagagttacattagatactgtatatagactgcctggcatacatgctccgtaactatagactattatttctcttcaaagcccaactcaaaaaatgaaattcttctctatgaacccttctctaatcctcccacgcatggcctctcttcttcctccacttccttctggttctcttggagttgctgagcacgttgccatgtcttagaactcatcaggaacctgttctgtcttcccctgtatccaaggtgggaggcaagttgaagtcaggaattattcttgtgttctgcacagtgccctggacattgctgttgtttggtaattgtttttttttaatggactgaatcattttgctgctgcccaggctgctttctactacaatagcctgtagccttaagcaaggatgagctattttccctttagtaatgggccagcatctaggccttgattttgagttcttagtatggtaccgtgaaaatcactagtgttgaaaggaataggatcagagggggaataaaaaggcatttgatgaggctcttagtgtaacagtatgtctcactcatctttttttttccttagcctttgaaatagacaatggccttgagccttctcggcagatggaccatgtttgtgccttagccacttaacagccattagcctaattccatcctctacagccaaattaaataataagtaaaggcctatgaaaagctggtttggaggcagtgttactgcctttcacttgacagccttctctgaagcagatgctccctctccaccctattaacctgctcctctgaataaggagctgtccacacagaagcaaagatagaggcctgcaggagagtggtctggattctggagatagggggaaaatcctgatgatgaaagtccagcttctttggaaggctgaggcgggaggatcatgaggtcaggagttcaagaccagcctgaccaatatggtgaaaccccgtttctactaaaaatacaaaaattagccaggtgtggtggtgtgtgcctgtattcccagctactcaggaggctgaggcaggagaaatgcttgaaactgggaggcacaggttgcagtgagctgagattgtgccactgtactccagcctgggtgacagagcaagactccgtctcaaaaaaaaaaaaaaaaaaaaaagcccaacgtccatccactactcccacctcataggccacagaagatgagagctttaacccaaagtcatgataatgcgatttctgctttgattggtcaaagctgctatttgttagtagatagtatatgacctataaaagttcacaacaagaaagtaataccctggtcttactcctaacaagtctgataatacattctcttttatcacacttttttttcctctgtgtccttgcttatagactcctcctcctgaaatacttccttctattccgaaatcctggatacccctcaaggacagcctaaatgtccctatcctcataaaacacatctccgattctcaatctcattctctgactcaagtacctcctcctcctctgagcacccttcacccttaatctgaacataatttctaactgtattactattttcaaacttgaattatagatgtatgcatatgacccttactaccaggatctatgttccttcagggcaggaactctatagtcatctaaatacttcctacaagtttaaacttatttgtattgtgtttgtgtgtgcacacatatatgtacatgcacgtatgtatatatttatatacatacacatatactcagtaaacattttttgcatcaatgcatacatacttatgggcattttaattttttatttacacactctctctctcagctatcccttagtggcctcagattttttctgcatgtagtcaaataggtctctgtgcttgtgaaaatgtttctatcaactgtggatacgcataacctgattgttaaggtgttactttgagagatctagacagtgtgactgcatttttttcaacttaaagactggcagaaatctaaagcattcaactcaattaattttctctaaaaaagaagaaatttattactccaacacaaagatacctattacaatggttatgctttataaataagcaaacatggatgtcaggttgggatagctctgactggtgaccaatgcattatctctatttctctcttcttgcccttgctatctatcatgataggccttgatgccccagagaacagaaaggaaaggcaccttagagacattttgctgttgttattctgatcttgtggtggcatatagacttaaagtctctgatataagaaatacacactaacttgtttgtttggtgccagttttaagaattttgaaaattcagaaggtagccattcatcatgactcttaggtagaaagcgccgtgttcaagttcctccagctgctagcaaggacaagcatggggtaggtaaggcagaccctggttggctttcaggcatcagggaaagaccggaccatctgttgccatggcaacattcattggttttacaataaacatgaacaatgaggtgctaagccttctaaaaatagaggcacgctctatttttttccatatttttataagatagtttcacgatatatcttaggactaaaattgagatctatcctcctggttacaaggggcgagtgtagtatccatagctttttgaatggcagactccaagtttgtgtgacttgagtatgcgtgtgtgtctatgtgtatacacacagttaatattgagaacagacccttgaagaccactatacctacctatggagcatgacataaagtgaaatgtagcattaaaattatattaaaatatttgggaaaaaatagacaattttaccacctgatccaaaggagggagctttttctaggcaagtaatttcactgaagtgatggctttctgtgtcagttttctttgctattactggcctgggcaacattaaatctggctgaggctcagcactggacaaaatacaaaatgatcacaggcactcaggcttctgtagagcatcaattcactttctaatgaaaaagaaggagtaaagagagtgagggaaaaaagaaattgttggcaagctaaaaagagtttaagaaatgaagaggagaaaaggtaaagtgatcagaggtgagaaaaatgaggagaagagagataaatggtttgccatgaggagaatgtagacctttaacgtgaatctgatgaaccaagccactccgtggagatggagaaagccagcctttctttccctccttagccactatttctggtaatatcaagtccatctgtaaggcaggcaaggtgaatttattgtatttaatagcttccaatttaacaagtcgaatcggagggatccccaaactctactccccatggctatatgctcacagtgctgtgatttatggtaagccctcctttttcctaaaacaaccacctgagaggatgtctcctggcacgcgatgtcctctgaaaaccagaggccagtggttttgggagccagacacaggcattgtaagtagcacaggacgcttcactcagcagacagggcaggaggcctcggtagatgtgcagaagtcggggagaggcagggctagcctgctgctctgaccagacctagtgaggcaggagggtgactgtcgctgcttggtgtccttcccatcacagcagtgaggctgcaggccaagccttcacctggacacgatcagggactctggctctctgaagggaggtggtgatctcttttctaatgcacttcactgggtccacattaggccgacaagtcaggttcctcagggctcccgatgatacagcaggaggatgtacattcatccctgtccatcagcgcctcccagggaacctgcgtgtctgattgaagtaatttcacccatagtgcacaaagtgtacactcaatcaaattttatagaatactttttttttaacgaaaacattatgtttgttgtgcaaagttttagggagcagtgataagcaaaagcaaaacagaacaattaaaaccacctgtaattccccatccacattcgtcattgttaacacagtagtgtatatgcttctgtcggtattttctacagttatgtagttatatttttcatttaaaaaaatgaattcaatcttttgttacctactcatataacttatgtatatacacatctttctgtttcattaaatattttatgttatattttattgctacacaatattctattttctaaatggaccatcatttaagtagtaatgctcagtggtgagagagttagattgtttccagtggttttgctgttgtaaatactgttcagatgaacatcctcattgtctttattcacaagcatgattacctccttaggatatattcttccagtggtattgtggcagagaatatgcaaacagcagggtttttgacacctgctgtcaaattgcccttcaggaaggtaccctgagcacctccaccctcagcctcagcctcagcccgcttggttcttcctgctgtcacccctcaccaatgctacctattatcattttgtttaggtttgctgcttgataggtggaaatgccatgcctttgttttaaactgcgttgcctggaatagtaatgagtttgaaattttccccagatgttgaagggctacttgatcttttgtccctattacctagacacatggatcctagctgggctctgggaagtggcactatggcaactgctaggccttccctctccttggagaggaattagcgagaaaatgatgcctcttcaagtgtgtttttaaaagagtttaaaatgtaaaggggaaaatgtagatggccagagagataaattataaatggaggataattatcgtagtttttaggaaaggtaaaacatcaaaagatacataaatgacaaaagaactaaatatcttaggaagccgactttcctaaggtaagaatcgtgtgctgagtatgtggcaccaagacctggaaggacccatgtccctcccaccctcccagtgccccgacctcccacctctggtgctgtgctgtgactccacagggagattttgtgccagtgcccccaccagggactcatcaccactctagcccaatgactccaaaattgccttctcctaaatataatgtccgcgctttgacttttaaaaatagcagcagaaaatgaccagggggcactctgtgatgtccaagattcctggggcaaagcagcccctggagcctgttcttaagatagctccatccttgtcttgctgaattatttacagaacttgtgagggcagaggctgagtagaggtacttcctttctgaacatgctcaggcactccctgggccaggcagggaagccagtgtctggaggatgtctgctacccggtgtcagggagtctgccattgattttctttaggacaaacctctctgcaaatgccacagatttacattagccgcactatagagacccagtcagggccaggcgcagagacgtggggaatgccacgtgctgatttcttttctgctctgggcagttgcttcttttcacttccacgtctgaatggcagggagaagctgggtgcccccacatgtgagtcagaatgtgacctctagcatttgaaagtcctagttattaaatatatgatctgagttgtccacattaaaaaggcatttgggagtgcggggatatggagaaagatgatgagcttgatgtttggattgatttattctcagtagaggtgatttcagcaggctttcccaggcaagttaggatactttagcattactctgggtatctggccagagttttcaggggtgttaaatagtgaggctcttaagaatgcaggaagcttgggtcatctcctgcgttcctagggtactgccgagactgggttcctttcatcggtgtctcggggggttgggggtgggggagctgagccacagtggagcggaactgtctgcatggacccttccctttcttccagctccggtgtttgcccacaattccactcacttaaaatttgcctttgtcttctagccaggtagcttgccaggggaaactgggtgtgagtcaatggccttcctcttcactctatggtcagcctctgtttttgtgggacagcatcagcctgaagccaggcaaaaggcccaagtcatgtagtaaaaagtgtgcagggctcaggactggaagcaaaactctccaccaaccagcttggtgctattaatcagatactgtaactgcctggaaagatgagcaaacaagctgtattcctcaggctcctattttgtgctgtctacattgtgtcctctgtgctacctcatttaatcctgttaatcatggtttagatgggggaatatcatctctaatatgcatatttagtaactgaggtttatagacctccaaggtcatgtaaactacgaggtggccatgctagaatttaaacagcagtttttatttttgtgaaagtcttgttttctttccaagatattacagctgtcttacttcacaaaattgtcctgaggaccagataattgtaacatatatgagaggtaaaagaaaaaagtctaaccaatgtttggtagtgtgattattgcttttatattctagttaatttttctgtgatgaaaaagcaagtttccaaaggccctggctttgaagggaagtaatgcaacttggcccagtctctgggtttatcccagaaagccagttcccctccaactccctcctgcaggtgcagttttcagctgggccctcagacacagtccactttgcatcccacttcttgggaaaatttttcttaatgttcactagcgctaagatcattctgaaacctctccctgcaccactgcaagactagtgcattcttaaaccctgcagcccaaccgttacctgtgatttattttattgtcatttattcccacagacaatacacataaaaataaaggtagtaagtgtaagagcattttaattgccatcccactagtcttaaatgtccactgtttttatatctccccctcctaccctagaaaatttcagaatagagaagatcaatttatcatcttatcctcgtttcctgatctcaaattggaagatggacagtttttatgttaatagagagtcgtttagagtcagggaatttttcgaaggaaagtcgagatagatggatgaataggtggttgtgtgtgtgtgtgtattatatatattaatattaatagagaggcttcctttgtggcctcatgcagaatgcttaaagatcctagaaatgttgctgtaggaatggaagcagaagaagccgcaggcttcatggttgattgcttttctgattggtgccataaaaaaaatgcattagcgagagaatgtttgatttaaagagcgcctagatgccgacaccacctctgtttgttttccttcctttagcagaaaccttgtaaaatttttatgaagtattaatggatctgagattttctccagcaaattttatgaggtgagcttaatcccacacatccgacccaatttagcagtctttagagacatagaacgtaaaaggcactcagaaagtatcctgggtgcctcagtaccaggggagtgatggggcaggggtagggtatttcctccctctcagtgctttggtagactctcaggggttgtgggagaacagagtgaagaggtaccccacccacagagaagaccgcacaggtaagccaaaacttcagatagtaaatcttaattcataacttagcactgacttcaagaacttccctatataactgtagtctttgatgagaaaatcgtgtttagggaaaacaagaaattatttgtattaacagtttctgtgctgtcaacctggaatcactggctttaatctaagaaagagacatgaacaccgtccttcctccaccccaatttgttttctgtatttgaaacaaaagagccttgaagaagataagttacatttttgtgtatgttgatgagtgcagctacgttttgtaatgtgaagtttggcctcccacaaaccaagcaacttgatgagcctcagcacactagtgagcatttagcagttcccatcacttacctgtttatgctgattctgtactactctcgcgagttcttgccctgtaatgtgtgaattccattagatttatggtgacgaaatgaaggaagagaagttttttggaagagaaataggagccttcgccaactaagaaatcactgtggcctattcaagaatggtcaagggtttgggattttaccctactttcaggcaaacaagtccacatgccactgtttcaggggtgctggcggaagaaacgagactccagggtcagagataaaagactttgttactcgtggcacagcaggcagcatgagctccatgttcgtgtcagtgctttttgttccccaggtctcaagagggtgatgtgtatggcccaagtggatgttctgtgctgaggtggtttgcaccacaaccaagtaacccctcatttagcaaactcaaatcttttgtaatgggctgcccgcagatttgcccaatcttttctcagaagagaggtgttctctttattttactggacataaaaatctgccttgtgccatggagggagacaccatttctgtcttaaagttcttcgctgtattaacatccttgaaaagatagtcatggccaggcatagttgctcacacctgtaattccagcattttgggaggccgaggtgggaggatcacttgagcctaggggcttgagaccagcctgggcaacatagagaaaccccatctttacaaaataaaataattaaaaaaaattagccaggtgtagtggtgcatgcctgtggtcccagctactagggaggttgtggtgggaggatcacttgatcccaggagttctgggctgcagtgagttgtggtcacaccactgcactccagcctgagtgacagagtgtctaaaacaatactttaccttgttttcctgcgggtgaatattctcatgagtaaaccacctcatcaaccactctgactgatcaaggttggtagcaaatccattcaatttgtctaatacagcatttaattaaagctactatcaacagggttttgtgcagcaggatgaagctgttctacagtattgacctcaacattgttccccaagatcccagacctaaccagatgaagaaatgccacagacaatcatggtccaggtgagaaacaaaagggaaagttttccttacgtttctatattaactttctcacttgtctgaggcatgaatgcaggtacaacagcatgtactagagattgcacagacctgagtaggcttgcaaagaggcagtggagggtagttgtgttatccataacaatcctggccagtgcattgaagctgatttgaattccttccagggcaagggtgttatctccttaaatacttgaggttctctgtgagcacctctgagcgtaaaagtcacagggtgttcagaaggggcaagttaaggcctacttccacacaagaagtacaagctcgagggtgttcatggtgcccctggatggaaagtcttgtttacagttgttgggaccctcccaggtaagacctccgtccatccagaatcacaacttgacattgcctccagtgtcatctcctacatgatcgttaggacttaggggcttcagttctgctagaataattgagtctaacccctgtttttgagggacttcctgccctgtatatccatgtcaccggctggatgccattcatctggcctgtggaaccatggagcagtcagtgactctaggaagggaatcggggagacaatggcagatgttgacatatgttttgtgatgatgttccaggagctggccccatcccctaatgttcatataaactgctcagttaggttaaggggaatcgtgatcaaattgtgttgagagctgtcaggaggggatgctggacccaagagtcagttaaatgaaggtatttgcagcagattgggagaactgtatcaggtcattttcctcatgaagaggatttatggagtggttctatgacaaaagatccatcctgttcccttccagggtctacagcgttcctctccaagtgcctgaggttttggtccgtactctgcaaaattggtctgttacatccagtagctctaacttcaccttttccaattattttctgctgatacctggaactttcatcctgaagattcaggtgcaggagggtcaatattgctttttgaaattcacagagatgcgtcatgcctcctactttggcctgtttgagcaccgtgaggggatttggacaacagcgtcttcaacctactggccatcacctttttcatccaggagcatgtcaatccaacaagagaattcaggcagcctaaccagatttaagcatgagtcccctagatccttttgtagccaggttgctacccaaagggtgggccaactatgctggcctggggttgctgtcaagggaagaaaataactcatgttcccaggaatggtcaagcagaaatcctgaatttgaaaaaaccttcattgttccctccatttattttgtcctgttgattatgcaggaaatggcaggaaagagatgatccctttcttggatcagccactttcgggggccaaagcaccctattaaggtgtgtggagtgggaggacatgagggaaaaagagacagaaatctttctgattcaatttttcagaggctattccaaagcttggtgataccagatgcctgtggatgatggggagaattaaagcccgtcaagtaatccttgactatcaaatccattatttaatcatttttgtgatgaaaggtgcagcattgctagactgaagatactctggaaagcctagcacatgacacaggttggtctgatgaaaggtgaagcattgctagactgaagatactctggaaggcctagcacatgacacaagttggtctcaaaggccacactagcatggggagcagaatcagattacactggagcagcagcactgtatcctgcaagagtggccggcagtgaggcagcatcaatagccctgagagggggtcaaaagtcagactgagtgagtgagtcttccagaactgggcaggggtaattccccatgccatgcaacctttcccactgagacagagatcaccttttgtcaggagtcaccaagtgtgaaatgcagtggtagtccctgcattcgaaacatagagtcttttactgtgtgcctagtctaggaaggcggacatgttgccacatctaggatgatgatggatccatgcaccaatggtgtccatgtttcaccaaggctccatcagcaacttgattttgcctggtctcatgagggaacaggcgtttgttgtgtcatctctgtgagtggcctaggtggtttgtgggtgcctacacccatcagattcccttcattctgagccccttccctccttatggctccttagcatactttcctgggtgcatatgtcctgcaatacctcttgagggagcaccaagaaataccagcccctctcataatcatctttctctttaaagcagttgaggtcagagtagagggggtaggaaggatcaaggggtgtgaaggtcgagagcagtttcatgccaataagcaaggcacaaccaaacacatttctaatgttatggactgcacaattgtgtccttccaaaattcacctgttgaaaccctaaccctcaatgggatagttttgggagatggggactttgaaggtgattggatcatgaggttggagccctcataatggaattagtgcctttatacgaagagacacaagagagctccctctctgctgtcctccctgtgagaacacaacaagaaggcagccatcaggaaaccaggaggcgggcccttgccctccagatctgctggcatctggatcttggacttcccagcctcaaaaaccctgaggaacaaatgtttgaaccactctgtctatggtaatttgttacagatgatctaactggccaagacactaatgtttgcaatccacacaaagttccgtgtcctcattgcttatgccatttaccctgactgtggacccttgggctcagcagctgcagccttcttgtcagctggggctcaggttgccaccccattttcatgaaaacatccctccctccttccaccccaagtagtgtgagcaatgaccacactgtccttcagcagctcgttttattcctacttctcactgcaacctccaaacgttcattaataggtcggatagtgaagatccttactcactgcatcccccacccatcagtgtgaaatagcgtttgctacagggtgtcaaggagtcatttcatatccctgacacagcctgggacgcccacttccttacttttccagaaagctacatctttgtcagcatcccattctcatcactgaaatctgtcaggaactgtgatggatctgagattttacccaacaaaagacacgagactcctgggtcctaggcaaaagactttattactgtggcacagccagtggtatgagcttcaagttcacaccagctcgccatgctccccaagcaccccaaatccacaggtgtgacccagagcagcgcaaatggaggctagacacttgggttgtgtttgcatgacagctggataactctgagtttggggaacctggatcttttataatggactgcaagtaaacctgctcaacttttgcctgggagggaaatattatttttgttatactgggtgttaaagaaaacatgtcctctgctcagaagggagatattatctctgtctttcaggttgttcagtctacaaatatccatgaaaagataggtcctcttcttgcaatatgtgcagaaatgcaagacacccatggagaatatctcctgtgaccttgctaaaaggattctagccagaggcactgagcaggttattgttggagctctactcctatgttgagagcatcccttgattcagccattatgtaggataacatgccaggctctggaataggcacagggtagtgaataaataacacagtaattgtttctgccctgacagagcttatacagacaaaataataatgatgacagctacacttatatagtgctcactatgcactaggccttttctgagtaatttatatgtacctacttatttaatcatcagaatgacactttgaggtagatactgtggctatcattctcatatttatggatcagaaaacagagagagagtgttagagtcagaatccaagcccaggtagtttctgaatgtatgcttctaatctgtcttagtataactaagtacgctagttatacttagtataagtctgtcttacatggcttctagtggaattaccacacaggattataaattcagtgattttataataaaagatgaactggggacatctaggaggagtttctaagccagaccaaagggctgcccagaagaagagatatctaagaacagtccagaagggtgagtggacattaaccaagggagctggagaagacagttctcagcagggaaaccgcgtgtgcagaggcccaggggttggttgggggcttcctgagatgacagtaacatctacttagatgggtcatttgttgtaaggcacacatttatttggaatgagtcagctggtgaaatttcccccagacttctaattcacagctctttgttttccgtgtatttttaactaaaatatgcaacacttctactgttgagatatcacagcagcctctaaagtgtcagcaaaataagccagggcatagccaaagtgacaagtgaaacccagcattatttgaatttattttgatttttgtagaattcaagtgtctaattattaatattaagcaagtagagaaattaaggcaagatacacatgggattatgggacacaagaaaaaaataaatattcaaagcttcaaagactttttggatatgaatagcttctttgatggtctctcttcattatggaatcctgttaggcatcattgtccctgtgatcaatggctagatctggccatcatcgtcagcctcccagtagcctgggtgaggctccctgggttgtgagtgaagactggttatcctggtctttcccatgctcattccacattttaatgcagtatcaccagcttgagagtgccatgtgatctgacagctttgaataattgatgcccctcatactaaaggagagtttaggttttgtggttcagcaggatgctttactcttgttgaccttaaccttcagaggcactcgggcattaccaagagatcaataaaacttaccctggctggtctgtgaggacaggagcctgacagagagtgatgatcaagaggagaggatgggaggattacgctggaacctggggaagaaaagggaggatgtgtggggtagagtggggaaaggggtggaaatagaataggggagcatcgcagaatgagggagacaggagctccgaaaacgatgaagtgcatgacaaagcaatggaaaacaagggttgaacagaggagaaagagtatcaggaggaacatatacagaagccaagaggatgaatgagggacgcacaggccaggaaaggagctctgatctgtaaccctcctccagtctgtggttgcaaagctgtacagtggagggaggtcaccagggactcaacgtctcctggaaagcagacaaggaaataacttatagagtgaggcagaataaaataagggttgtaagaaaggaatgcagtcactgctgggcattggaggcacataaaagggactttaatgcttgaatgccaactacatgctaaaagggcatcggcacattattttaattaattattattaattgtattattaaatattgtaattattacataatatttagactaattgtcaaatgaaagtctcaggtaggaattattgtcctcatgctaatgatgaagaatagaagcttaacgaggttgagtgctttgagtaagctcgctgatcagtggtggagctggaggaggcttgtgactctgaagcatctttcaactcttgtcactgtctcaggctgccgcccagaaaggcaaacattggagtgatttattcttacaaaggcactggagaaaacttcagtggactatcagctaattgaaggtgaggactgtgtctgagttttcaaatctgccatggctagcatagtaaacactgcataagaatactaaatagtacatggaaaaaggaagggttggagcttgggtaggtaggtagagagcaaaggagggagggagggaagggggaaggaaaggagggagggagggagggaagggggaaggaaaggaaacatgagagggaagggaggaatggtatttgtgctgaatccagaaaaacaaattgcatttttctgggggtgatggtaggatgaagaacactcgagggtgagttaatagcataatcaatatagagtttgcatttgtgtgataaaaaaatgacaaaaattcactctagccagagtctagttggaagaaaatagtgggagatgagtttgctgaaacagaatggatcctgattcattcattcattcaacaaatatttaccgaggcagaataaactaagagttgcagtaaaggcacagctatgaataggcactgctaaaggagcctaggatacatcagtgaacaaaaccaacaaatacactttccctcacagagcttacattctagtgaaaagagacagacaataaacataatacatgaataaagtctacagtatgcaaaaggtgacacatgctattgggtaggggaaaaaagcagaatagttgaacaagagatacagggacaagtccaaatagtatatttaggttaaccattatggaggcgatgtttagcaatatcttgaaagaggtgaaggaatgattaacgcattttcctaggaaataaattccaggcagaagggacaggctatgtaaaaacctgaagacagaagtggacctggagtgtccatgggcaggggtggctgggatgcagagtgtggtgtcaggtaagtagttggagaggtgacagcagtctcgatcaggtcaggtctcagggaccctctcaccatgacagaaacaggacccagtggatggctttgagcagggtaggggtagaatggaatgtgttctaaaatgggacgctggcctctgtgtgaggacagacatggtggcaagtggtcagataggaagctgctgctgttgtcactcacagatggtggtgaggaaggtgcccagggtcagattgtgaatacctttagaaggaagagccagtaagacttgctgatgggttacatgtgggatgtgagggaaagagaggtgtcaagagcaattccagggcttctggccaagttgccactatctaagatgggctatgatgtgggcaaagcaagtttgctggaaaagatcaggagttatgttgtccacattaagatgaaatgagtgttagacataaaagcggacatgccaagtggacaggtgaatataaaagaggctggcacggaagagtgatgtcttgtaggagatttacactggagtggggtcatcagcacacacatggtatttaagactgtgagatagaagagatcatcagatggagaatagaagaggtccaggcatcgtgggtggtctcaaatgccatacccacagttcgaaactttaatttatgatcagtggggggcaactgatatatacttttggaggataggcatatcacggtctcagctgggcttgtttcattgatgcttttttttgtttgcctgttttgtgcagagaccacgctgaggtcatgtgtaggttggccctgggaaggccaaacaggaggctggtgcaccgagccacatgaaggtgggatgaggaccaagccaggaccattttaatgggccagggaggagcaaggagcaggcagagataaagggaagaagggaaaagacaaccaacttccctttcactcagttcaaaacagcaatcaccagatcaatagagaagaaaacataatttaagcctgaaacgaaggtttttgtgttttcttctctctcttttttgctgcttgaggcatggcaatgcttgataatgctttgcttcctgggggcatagctgacaacagtggggaaggaaatagagacaaggttttcagtattttagaaatctggtttctatctgaactgtggagggtgaggagcctgcttttctcattaactggtcagcatgttcagaatctgagagggaatttttgagacaaacagatctgaatgccttcagatagaaagatggaaatgtttctcctccccaaagtcccttgaccttttaaataattgccattataccaaccgtatataggaatcggctagaaataacataaataaatgcgaaaccatgtgcctacacgtgctagctagtgttttaccaacaagaatgggtacaatttaaaatcacctttatacaattatcacaatgcactctcacaatgatcttgtaaagtgaataaggatctcctcccctacatattttactgggaaataaaaaacaaaaaactaagacgtaagcaggctgtgacttgctcatgtcagagagaaacagaaccaagaatcaaaccaatttgtgagcggaggtctgcttctccacggtgtttgctctctggagacagagggaccatgccactgaatacactggaccctggtatccagtgcatcctcaggcccataatttgccattgaacagttcatgatcctctaaacttggcgtcctccccagcacctgtttcttaaacatattaaggttaaagagtggcaggtggcggcccttcttccaatcgtacccagcaaaagtaggctcaggggctcacatctggagatacaaagggatgcccatttctgtgtctcttgcctgatcttgaaattacccatcttgcctgatcagcgtttctgtcttcctgactccatgtgctttccttctgagtctttctggactgccctcatgtgctgtagtaaaagtgtagcagcgtttcaagctatggggttattgctgggatattttatatctaacaggcatgggggtgataattcctttttcacttttataattcacacatatcctcccccgaaatgcatttcgtatagagcttttaggcaactgaacacaaagagccttccacccccttaattctcctgatccttatttcaactattttcccactggctttttctcttactgcactttgggccaactgaaagccagtggtgtttaagaactcccttatggattatttgtcagtaggcaaggggatgctacctctatacctgaaacttccataatcaagcacagtttattacagagcaaatacaggacagtagcagggcttttaaaaatcaattagtgtgcaattcaagattaaaaacagaagagggctaattctatttttcatttggatggtaggctgcttaaggaataatagtacaaagactgaagtcattacaggaataatcagaagtttacccaggtgtctttctgagcccctttcctcctcaaggctcagtagcttactttcctgggttcatgtgtcctgcagttcctcttgagtgagcaccaagaaatactagcctctgtgaatgacaggtgggggcttcatgagagctggaggtgatcgaagacaggtcacattctcctaaaacctctgatggtgttttctcttcctatgctagaatctactccattcttttagctgtactctgtatgaatcatatgtacttgttcatgtttttctgcaattactcaaaactgtgtcttcttgacatatgctgtttgtccatcagctccagagagcaggctcctttaatctgttggctttggagactgagcaaggggaggcagggtgagtcctccatgcctttcactatggattagccacataatagatgttggggtttcatagtttggggttttgtggcatatgatgtgaatagaagcactttagactctcggcagatctatctctttgaagttctcttattatgtctaattttgagtactgcacagaatagctataaattttgacaatgataacctgctctctaaccccaggcaacctgctcctcttcccttttcaatgttttcattttagtataaagaaagagcgatgataaatttttttatttttattttttgagacagggtcttgctctgtcaccgaggctggagtgcagtggcaccatcgtggctcactacagccttgacgtcctgactcaagagatcctcccacctcaggctgcagagtagcagggaccacaagtgcgcagcaccatgcctggctactttctttttatggacatgacgtctcactgtgttgccatgctggtctcgaactcctgggcccaagtaattctcctaccttgacctcagaatgtgctgagattacagatttgagccactgcacccagctaataattcttatataaaggcaatgaaagcaatgcaattagaaacttcacctgcaccctgtcacaaccaaatcataattgtcctcatgcatccaggtcaagaataatggtgttaaaagccagttatcatggctccaatttttctatgttgacctgaactcagcttgtgctagtcttgggatttgattgtatgttttctgtttggcttccatgttctacctgccagtgggcttggggacctcttgccactctgcaccaggtaaactggaactccacatggaccttccgatttggtactgagctgtcattcatttgtcaggcctaatgttgctaatcctcttctggaaactttatccttcccgaattgggccacctgattcctagctgaatgttcacatctgctccccattccttcctaggacctgcagacagaggcagcaggtacagttaaactgtggtcctagcctctgggattcagcaacacttccgcctcgctgcttatctgaccatttttattcccaggcttatgccagttatgatatacattccaatcttatacctgggctctcccctcattcttcattcctgatcccactcattattcttcattatttttaccacagatgcagggtggctgagggttgagttaatcacattcctcagttcatagcacatcatcatccctgacaaggggatcattgatccccaaaagtgttatcttatttttcccctcatctctgattctatgccttgtccctttctgctacagcttcccacaccaaagcgtttcataaatttcattaaatgtgcatgtgtctttataaaatgtgatggtgcattgtatgcatatgtcactgatttatccatttatttgatttatcagggctgtctttccaattcccctctaacccaaacaagcctatgacaaacaaccctttacaaaccaatgagaaatttccctagtttcatagccagcggtgattttgctgggtcatgggactccacaggcttaattgtctaaatagctgccatattgcttttcaatatggatttacaagtgtacactcgccagtagagtgcaagagtgcccatctgcatgcatctccaacaaaacttagttttctctaatctctgattcccatttttaaaaccatgttcacgggtgtaaaatgacacctcactgttattttcatttgcatttctctggtcactggtgtgagctctttaatttgtgtgctttctcggctttttcttatgtgtattaccgattctttggcctattttttgattgaaccacctatctttttcttgtagattttcaggaaaaaatgcttggtatattcaagatgttaattacttctcagttgcagatattgaagatatgtgtcagtagatattgaagatatgtatcattttgctttgtcgtctcttaccatttgtcagtggggctcttcatttgcggtatagtgattaagagcatatatgctggaaccaacctgcctgggtccaaatcttaactctgcctctgagctatgtgacctcagtgatggtccttaatcttctatctatatgtaaaactgatatattaaaatgaccatctcagcttgagcaacattctgagaccccacctctacaaaaaaaagaaaaaaaaaaattagctgggcgcagtggctcacgcctgtaatcccagtactttgaaggccgaggcaggtggatcacaaggtcaggagatcaagaccatcctcgctaacatggtgaaaccccgtctctactaaaaatacaaaaaaaattagccgagtgtggtggtgggcgcctgtagtcccagcttgggaggctgaggcaggagaatggcctgaaccctggatgcggagcttgcagtgggctgagattgcgccactgcactccagcctgggcgacagagtgagactccgtctcaaaaaaaaaaaaaaaaaaaaattagccaggtgtggtggcacacaactgtagtcctagctacttgggaggctgaggcaagaggatcccttgagcctaggagtttgaggttgcaatgagctgtgattgcaccactgcacttcagcctgggcaacagagtaagactctgactcaaataaatacataaatacatacatacatacataaaaataaagttaccttcttcatagggatttactaaaactgaatgagttaaattgtgtaaataacttacaatagtgtctggccaaacacatacatacacatacatgtatatatataaattatatatgtattttcaaagaaaacaaataataatttcttttttagctttataattttgccttttccatttaggtaattaagatgaagtctatcttacataataaaaaataatcttaatgtaacaaaaggtagggctatagctttgtttcctcccacgttgtgagccagttttccagtatcatctactaaactgtctgtcattcccattgctttgagggactactgttttcatatgttgggttcctgtatttacatgcttctttttctgtgtttctgctttggcctccacattgcttttctgttcatctgtgctgatggaacccccgcataatgtggctctcttggtttccataaggctctcaataaccaccctggaacagaggcagtgtcagggtattaacataaacatgtttttaaagataaaaaagagtgccacttacaatctcatgtataattttaaatgaaagaaagcctgtgattttgggccactgttgagtgaattgtgtgtcagcattctcattttgaacgtgtctcattcagcgatgtctaaatcactttgtgccatcttactaagtagaaacaattcaacaataaccaggcagataaacaaataatcaagcagaccaacaaaaacaaaataaacaacatgtacttaacagtttacttaagtaaagaaaagattcgttctttaggatctgtgaagaactctaaatgtattagaatgactccactttccctaaagagtgttctcccaatcagggctgcctttttcctctgttcccatctatagtcatgtcaccagggatgactgcgcacaagtgaagtggaaaaaacacagtcagatgtcatatcacctctaatcctttttgtgcatccagttcttccaataggatacagagggggaagttgagcacaagattctgcagcggtaactcaggacttttgggaatttcaaagcctagaattctaaatgtgaggcctctcacttagctcttactttacagcatgtggaatagttcagcccctcaccatccaaggcaagactggtgaacctttattagtgcttctcatgtgaagcatccatgcttgttcctccactccacagtgaatccctaagggcaggaggggagtgctttgttcttctcatcttgtttttagaagactaactggcacaggccaggcgctgtggctcatgccgataatcccagcaccttgggccacagtgggcagatcacctgaggtcaggagttcgagaccagcttggccaacatggggaaaccccgtctctactaaaaatacaaaaattagccagatgtggtggtgagcgcccgtaatcccagctgctcgggaggccaaggcaggagaatcgcttgaacccgggaggcagaggttgcagtgagccgagattgcaccactgcactctaccctgggcgacagagtgagactcagtctgagaaaaacaacaacgaaaaaagaagagtaactggcacagcataggcattcaatatgcacaacatgggcttggactgtgtggttcactcatatgcagattttcttctgcctgtgccacccctgaggctggaagaccaactcctcagcctactccagctggagatggtgaggacgaagacctttcagatgattcacttccacttcatgagtagtacatatattttttctttcttgttattttcttaataacattttcttttctctagcttactttattttaataatacagtatgtaatacatgtaacatacaaaatatgtgttaattgactgtgttatcagtaaggcatctgttcaacagcaggctgttagtcattaattttgtggggtgtcaaaagttatatccagattttcaactatatgggggcttggaaccctaactcctgagttgttcaaggaacatctgtgttcaaatgaatgaatgaatgaatgaattgtgttaaaattgtgtctgtgataacttattccttacccaaaatgcatttaggctagctttttttaagataggagtccttttgcattttccttagcacctcagaatatttgtcctatagacaatttgaacagtgatgagcatttgcatatttataatctacatgtgaacttatacctctttgctctcatgttaatgagttcaacacatagtgagttagcatcttctgtgagcatagcataacgtctgagaggtgcacaaaagatacgtgtaatgtgaaaagagattagaagatgtaagcatgggctcttggatctgactgcctgggttcaaattttgaccctggcatttataaaaaacatgaccttgggtaagtcactaaaatgctctttgccttagtcttttcacttgaaaaatatttttttttctcatagagttattgtgaaaatttagtgagataacatatgtgcaaggcttggcacatacttagcactgcataattattaggtcctagtgtttttacagtctgacctacaaaactttcaaatttagagggggaaataagacagagactggaatagtctaaacttttgaaaaggctaaaacatatcacaaatgtcctaaattatgcctatatcgtgtccttctgcgagcctccactccatttattaatagtttgcaaaaaccttcagtagatctccctgcattgacaagtgagttttcttttcttagtggagttcttcagacaatgcaatctgacctatcttgtgccttaaaaaatattcaggtacagtaatataactgcctagtttccttgtttttctttcttcttattttttgccttttcaggtaacaagtgggaccaaaataagaatcttgccttctttttttttgagacagagtcttgctctgtcaccagtctggagtgcagttgagcaatctcagctcacttcaacctctgcctcccgggttcaagcaattcttctgcctcagcctcccaagtaacaggactacaggtgcacgccaccatgcccagctaatttttgtatttttagtagagatagggtttcaccatgttggccaggctggtctctatctcttcacctcatgatccacctgccttggcctcccaaagtgctgggattacaggcgtgagccactgcgcctggccgaatcttgccttcaatggaaagcctagtcttctagatttataagccttaaaatgttaggggaggggggaaaaaaaacctccaaacaaaaccccaataaaagcttaaataagggcctacgtgaatgaatttgtcatcagatgtgtttgggttgcttgccaccctatttaacggtgtgtttgttttgtgccttttctgcctgagttggtgtaaatgtcttttctccacggtttccttcctgtgatgacatagatgggttggattcgagagtcctcagcttaccgctcttccacttgaaaggaagagggtcatgagaggagaggatttctggagtggaatttcaatctctggtcatcaggaaagggaaaacattctgcccaggatttcctgtcatttattctggagagctttgtgttgtgctctgtgcaggatccgagatatgattaactcaactctggagtctgttggcagaaccaagcagctctggcatcagaagagagatgtccttaggcctaacctgccctccctggggtcttgttacctgctcaaaaagaacccagtggcctttgaatgcattttaaatctgtgattggtgcagtttgatggtccttccttccctccttccctccctccctccctcattccttccttccttccttccttccttccttccttccttcctttcttccttccttcctttcttcctttcttcttcagtttaactcagctttcaataagcttaatgggatgaagtccaagcgatgaaaagagaggtgataagagcacaaaggggaagcttatacccgagcatgggtgagtacaggagatgggttgttctgattattcttgctcctgttttgccttggccaccagttggccaggtcggggacagtatggtttatggactgctgtcacttgactcttccttctcagttgccttttaccttggatgaattttcaacgttctcttcccactttcaatcataaggagttgttgaatagattcatgttttctttcattcttccttccttttgtcttttttaactataggagatgggcacactgttcaacacacagataatttagaagaatgtttcagtgtcagttcttcctctccaccctctttcaccccagttcagtcataactgaaatcacaaatgaatggatccaattaatagtaaaaataaaatgtccaggatgctctctggagttctgagatccataggtcacggacagactcaagaatacaaagtcttcttcaggcctctgtttctaatttgcagaagaaaacaagagggtgagtagtattttgctttgaaaagcatctcagcgaaagtgctacatgataacacagccctcatttccataattctgctccctccggagcacaggtacatttaatttctcacaactgttccctaaatgaagagcagcatgaggaatacacagagaatgaaaaatatcggtgtgtgtgggtagtacatgaccactaatctttcctgacatttactttcactcatgagcacaggggtgaccagccccaccagtcctagatgctgaagataaatgtcagcaccatccattggaagctttctatgcatacatgcatattggaaatcaaatatatttggcttatcacacactgaggaacccatcccttcagaaatgcatggattgatctctgctaccccactcaccagtgccatttggtaaagttggggaatggtaagatagttcgctgcatttttaatggaaggaaaacaaaaagcgactacgcgtaacagtttttacattatatgccttcagtgctgtgtgctgtcaccccacgtgttgtactgccaaatttcccaagagcgtctgctcttcctattgtgaaaacaatgagctggtgtatgtcatgcaaggctattctgcccatgccaaatagctctgtatgttttaactgtcttcacactgggctccaccaatcactcaggcgcatacctcttcctcagccctaggcaatagaagttacagcattcatgagcaattgctttcctcacataaaggaaaaaaaggattttggtcttaaggtcttgccagctcattgactaatttactcctaatcctgaatgtataaagccacttgaacatttcatttgtgtgacatggttaaaggcttacgtaaatatagctggtaagggctaggattgtagattaaagtcagaaagaggtgattttgttctttttgactagatactgtaaattctgatgtccaattaagatctgaaggagaaacctttgtaacccaatgcaatgtgagtttctcgaagaaaaggaaaaaaaagggaaacaagtctccattctcagggacccattaacagctcagtacaatgactctttatgtggcctttgatatgcaaaaacagcccaaaataatttatggagaaaatcaattatgagctgaagagaaaaagaaagttgcccagattaattaccaagtcaggaaggatggcagtgcaagcacctggagttatgtccaagggggacgcccttctgcaaaaattcttcatggtcagaagaaggctctgtggtcaggagagaagggagccacatgaagtcagatgagctgagctgtaccttctggaatgctgagaatgagagcgcatatcatctattcagtgagataaaaaggctgcttcaaaactaaaggtatatttcataccctcgagtgtgaagtgcaaattgacaatggatggaacaatagcattggctagaaagcctggaataaaaccatcacaaattgaatttagagaacttatgaaagctaattttatgcatgttttattttattacatatttttctttaaaacagtaatagactcagggatgttggcaatggaggggattttagaacacctagtctggtggatttcaaattattcgggtcagagcacctattcttttgaacaaatcttactcattattaagaaattaaagcaaacaaagtcagaagaaaaaaaacagtagacctgctctggctaaggggctgatgaggttggagtctcttccctatttcctatgactgttcccgaggctcctgcagcagtaacctaaggctctagagtctcttccctattgcctatgactgttcccgaggctcccgcagcagtaacctaaggctctatggaacactatcagaactcagtgattcctaatattagttcccacactagaaccatgcatcctctaccaaaatacgtttccttagtttaataagtttgttaaatattgcttgcacaacccagagtttggagaattacattagcacattgaaggctgtgagagtaaaacttcagatttgaaatgcattaacctatgtttaacctggtttttcacctgcatacttgaatgtacctgaccgggaaacccttttatcagaaacacgtattaacattctgtggcagataagtcccctaggatgcagtttagaaaacaaaactcttgtctgggttccagtctaactcccttgttttttaagtgagggtacagagcctccgagagcatgtaaatcgctcgctcttgggtacatacttggaagcaaagttaggaaccagacataggattcttgaatccatgaagctaaggggattttcaaacatattttctttaatatttccacatgtctgtgggcagggagcagtcatgttctattcttttgatgctatacactgaaacacagaaagtcaaggttacccagtcaaactctagtataatccttccttcagtgccctggtcggcttgcttggtgctaaaagaaaaaaatcaatccatctccctgctgagtggaagaggataaagctgtccaatttttagatcttagatatttaaactaaagaagtgtgtgatagcattattaacaattggcgtagtaatttcttgaggtttagataaactagtttacattcgcaacatttagtgatgatttaagatgctttgctatgttggcattcaaaaattgggcaaacctctggccaaagtgaagtacagcccatgtgagctatggaaatgcaattaaaaggagtcacagagccttctcaactgcctgggcttaattaagatatgatctgccagtctcttagtggccattaattcattgtctggtaatccaataaggggttattgtttgaagctgtttgagagccacttgcctcactattaactcaaaattgcccaaaaggcggtactacaatgtcattctccctgccccaaagaggacatgacattgaaagacatttgacatccacatttgacaacacttgaaatggcaacattatggcttaagcattcacaagtctatggatatgataatggaactagtgacatctaattactaactggcaattaatgataatagccctttgtgaatatgtagggccattctctatagggagctccttgctctttgcacatattaattaatatagataggcaggtaggtgatagaaaggtggctttataacattattgctgctgagtaaactgagtcaggttccaactgcaccttgtagatgcacaacgattccttgctgttttgaaactaaatggattacaattttaagagtaattaaagaggaatgagaactgtagggaagtgaagggaatggatgtcaaaggaaaattcaaggtatcactaactatttgaattcttgatttacttccacccatgtttctggaataggaattggtcatttttcccggattggtagccagatatgaaacattaagtcggctttcagcaaaatgatgtctggtatattcagaataaggccgatttattttctccccacagagccccattgatgctgaatttttattgcccaatagaattcaacctggttgtgattatcccattggtcctgctagataaaacccatgtgtatttgccaaacacccacttggaaatggaaaatttaattaaagacaggaaactgaatttaatgatctctactgatctcttaaattccccaaattatttcattatggcttacttattgaattttcttaaggaattctaaaataaatgaacaattacctgaattttgcagtgttgtacatagaaatagagtgagttttcaccacactttcaaaaacaagtgagagtctaccccactaattcatatattctttcattcataagcatttattgagcacatacagtgtgccaatgctgtgctgagctctgggtgtactgatagaaaaagctttgatgtggcccttaagatgctcagtgtggtgatagaaaggaagttaaacaaataagtacaatccggagtgaccaattctacaacagaaagatgagcaagttatggggagtaatgagggcaaagaggaatgagagttaactttgtgagtagcccctgcctggctgtgcgataggggttcaaatccgactctatgtttatgggaagtactttgttccatctgcctatccacctgtcattacttcaagttgatttaatagttctgcagttgggacctgtggggtgtgtgtatgtgtgtttataataagtttaaatgaggtaatccttttataacctcactactccctattgggatttgtttgttttgatggaagggagggagatgagatttggcacatagcaggtatccagcaaatgcaactgcagcctgaagagtcaacgtggacaaatcccaaacaatgtgagccctttgggaatgctccgctttgtgtttcctctgaattgcatgaggctaccagatgaggacaggaggagaaagaattaaagtgtcctgacaccgtgttccaggttgtgtagcttttaagtgggcacccatttttccacctaagagctccaatgtgcctctgtttgaccacatggctttccggttagctgtgtgacagctggatgtcccagcatttctttctctccctttccaatcacgagctggagcagtcttgatgaatctctgcaggcacgtcgtcctcaactgagggatgattcattggcatgaagctgttaagtgattaaaataaagcacttttatggaaacgttctgcttactctgtgttcccagacacctctgtagtgtgtctgtggcaagagaggactgtaggggacacacatcgtcttatcattttctctcttgttacaatatccaatatttctgtgctagggcagaatttgaaaattgtagttcaattcagataaccttgcatgtgctcttgggcccttgaaaggagagaaaacaggcctggtgcggtggcttatgcctgtaatcccagcacattgggaggctgaggcaggtggagcacctgaggtcaggagttcaagaccagcgtggtcaacatggcgaaaccccatctctactaaaaaatacaaacattagctgggcgtggtgtcaggtgcctgtaatcccagctacttgggacgctgaggcaggataattgcttgaacctgggaggcggaagttgcagtgagccaagattgcaccactgcactccagcctgggtgacagagcgggactccatctcaaaaataaaaaagaaaaggagagaaaacaagcaaacaaaaaaacccacagaaaacaacacaacaaaaaacactaaaaggaaaaaaaaagaaaccgtgcagtttgaaattatctcctaggttgcccatctgcccaaggggaaaagtctatgagaaacatactggggtggagggaggggggacttggaggcagcaacacactgttctcatgggaagggaggctcctttttgtttgttttgtgcacaggaacttgccctgattggagtagagtttgcaaccctccccagtgtggggtttctttgttacgaagatcaagagaaggcatagggaatgcaagaatgtaaagagaaagaaggggcaagaacaaggatgaaaggagctggagaagggaaagggacagcgatggcaggaatggagagacacgagaggtgggatgaggaaacaaggagggtcatggaacagacacagctgctcctgaaagttcaggagcagctgggagaggggcttctggcttcttccagccagggtgctcccctatggaaagcagagtttctgggtctgtcccgtgtatgtgccctttaaagcaagtgtcactggagacacataaaatgaaagggggggcagggtggaataaagggaaaaattattgtaattcttaaacagacaactttaaaaagcagtgatttaggttgttttattcattacacgtcataaaggactcaggctgtggtgcccactggctttaaaatctaggaccctattaaaacctttccttgttagtaactcagagctttggaaatttgataagaaaaaaagccaatttaatcaaggcaagatttaacacaaagaaaggacctggtcttgcctttctgcagaaaaactttcaggatcaaatggcttatgattttcatttacctaaagaatcccagtggaatcagcagttggggagaggaggggtcatttcattagcttgcagggcatgcccagattcagtttcttcacacactactggctgcttccttagctactcaaaggaaaatgatttttttttttttttagtcatactacatggaagaacacccattgtctaaagaagaggcaaaagcaaatctgcctaatatctgaaagtaggaaaagattggttggtttatcttgacctcagtagatcccattttcaataacctgtattgtaccttcaatcctcaaatgataatgtggcatttgtggcatcacaaaaagagatgctggagttggggagacacagggttgagtccaacctctctaaattgtgtaaattattaaaaataaaaacataacaaacctcatttttcacctctctaaaatggagagtataaaattgtatctttttttttttttttttttgagatggagtctcgctctgtctcctaggccagagtgcagtggtgtgatcttggctcactgcaacctctgcctcccgggttcaagcgattctcctacatcagcctcccaagtagctgggattccaggcatctgctaccacacccagctaatttttttatttttattagagatggggtttcaccacgttggctgggctagtcttgaactcctgacctcaggtaatctgcctgcctcggcctcccaaagtgctggtattacaggcatgagccaccacgactggctataatattgtatcttctattatataaataaaattctctgagttgactcaatataaatttatgacttgctcactcaacaatctacaatgaatgtttctgattgttgttgaggagagaggctctgctccatgtagtcactcagggatccaggctaaccaaggctctgccatcttgaacacatgacgtccaaagttccctgagcattagcttccagccaaaggaagaggacagaatatagaagaatacataagggagattgttaaatgtcatatggtatatatcactttttcacattcttttggctagaatgaaattacttgatctacctgcctgtagagccaaagaaaaggaatgtaacctaattaatgccaagaaaaaatagacacagattttggtgtacaggtagcaatcatagctacagtaggcatttaagtaaatatccatttgtacccttcttcacatactcagaatacacagccccaaggtagactactcaaaatccaattcaattactgcattcagctcaaagtccgagttcacctggtggtatttactcctttttcttcatgatcagccatggctgtttatggatcactgacgtataactgaaaagattgccaccccttattccaaagtccttttaaatggggtagcaagatgggattatcacagtaaaacaccttatttggaaaatggaagcattgaagatacacagcagttactggttcatgggtgatatttttgccccggcagtggagaagcttcttatctatactctgattctgttctccaggaggagatttcttacctattgttagtggtggctccctggcgtcacacactggatagttcttctttgttcagcatcctccatggccacatctgaagtggtcattgtggagtacgccctacttgggggctgaatgaattatctagcccatttgctgtgagtgcatgttggggtgtttggcagttggtttacagttccaggctcttttaaaggaaaatcatagtttttcagctacacaaaaactgtcaaaagtatcataagcttcttccctatttattttcaggcagatccatttgccacatgaaaaaaaataaaaaatataaatagatataactcatagacctacattattgctttctttttgtgttactgtgccctttttcttctcttaatgtggatacattgggatactctgaaagaaagggcgtggaaaggaaggtaaaaaccttgatttgataattgccacgaaggtgaggcctttcgtcaaatcgttaagtaatattgagcctttgctgcttagaaccattttttttaatcttcttcctgacatttgagatccagactgagttggtgttctcaaacatttctgaaatcagtctctcattccctcccccttcatttgcttgaaaataggagcatctcttctgagctcatctcttgtgatcatcggtgtaaacaaagaggagtaatcaatcccagaaacgctttggctctttctatccatttcttctagagccgcaggttcagtaggcacttggtttgtcatagaagttatcacaagggacagttttaccaaacattttgctatttcacaacaagggtctacagacttctatctcattctgttttcttgacacccattgcccaagtgcaatctgtgaacacatttttgatttaatcatgccagaatcctactcttggtaccactttcaaaattaactaggggcacattagttgttataacaaataaacctgcaagtctctgtggagtaacaacagctctccatcctttgcccatgcaacagtgcaacaccgtgctactggcaaccacgggtgtcaggcttggcctcaggcggcatccgggaatggtgcatcaggaggggttgcctaccctcagtttgtgacttccaagatcaccacgagtcttgacatcttcctggggtaaggggagagcacgcggcgtcataggaaaaagttacgaagggcccgggattaggcagttgtgcatgttactcctacgctcattccactgggtagaattcagtcacagtgtcacgtaattgtaagaggtgggaaaatggcatcgagtagggtgcccaagaagaagagaaaacaagttttggtgagcagcaaccaatctctcttacaatatccaccacatataactgttgtgaggactgaattaggcctgtaaagagtctgtcatcaggacacagcacatagtgagtgttccacgagtgtttgctctgttcacctccctccgccctctaggcagccccgaagtacccaataagcacttaataaacacagaataaatgaatcagtattcatagttatttcccctctgaattggagagctttgaaatctgaccctgttttggattgaactatgctggatctctttggatctgatttttctttgaattagaaacatctcttaggaaacctagactatctttcaaagaaccccatctggcctattggaaacagtttcaaagttgaaacatcaaccatgacaggtcctttggccgctaaagatgcagcccctagggatatgtctctgctggctgttcacatgaaatagcatagcagagattggatgagagtcatctgctgttctggattttgcatcctctttaaacacatctgcctttaaacatcctttgcacaaaagcttaattttcccttccctaggttttaaatcactttgcagactacagaaaaagattacagaaggcctgtttttgttccattccttttctatacttgactatcacgtttgcttcttctacctgacattcattttattgtttcagttaattaaacatgtatcatgtcatgaaatatgtgggtcacatttatacacaactcaccagagttaaacttgctgtaaccatcctatctaaaattgcagccccttctgtccagaactttctatcttatactcctattttaacattttccttaacactttagctgctggcatgtgacttatttatttggtttgtatttgccttccttattaggaatataacctccatgagggccagagatttttacagttttcatttagggctctattgccactgcctagaagagtgcctgactataaagggggttcaataagtattcattgaatgaaaaaaatgatccttattccttagtcttaaataacttaattcttatgggggaaatctgacacattccaacataattataattccaacacaactccaacataattattaggcaaagaagattatattggttaatttatgatgtgtcagtgttaaccaagagatgaaaggggaaagaagggagaaatggttgttgttgaggatcttttattccaagcaaattttgcttacattatttcatttattttaaccagtgtggtagttctaaaaacaggtggtaaatgtcccatattactaatgaggaaactgatgcactaaaaggcagttatttgtctaaagttgtataactagcaagtggtggaaacagtattcatcaggtctgtctggctttagtacctgtgccaattatttgcaaagttgttcatactaatccttagaaataagcatattttaactggaacacactccagacaagtacacacatgcacactcccacacagactggaattatttaagatttagctatttgcaaaacatgttattctgtcctattcctcctattctattctattctattctattctattctattctattctattctattctattttcattccagcccatcccatcacttttatctttcaaaatttgacccattaagctgtttctgcagtaaacaaatgtattgcaatacagacttcgaagatctttgcttttaggcacattacctggtgaggaaaagaactgaagatttagaccacaaagtgaggactagagaatactttattgtggagacagtatttgaggtaggccttgcaaaatggattgagtataaagaaaatcttaataaaactttcatcatttcaagcaatattacttcacttaggcttctatcaaataatccaaatgctctgtattttatgatgaggctgaaaaaaagtccaaacactcaaatgtgtggctttcttcatttgaacagtcagccactcagtcaaagattagcaatcatttgcttaggaagtaaatattgagcatgtgctatatgccagccagtgggctaaatgctggaaacgcagagatgactcatgcacactgtctacctgtaaggaacatatgtttgttgccttagtccaatctggttgctgtaacaaaataccaggctgggtggctgataaacaacaaacatttattcctcacagtctggaggctgggaagtccaatatcaaggcaccatccgatttggtgtctgttgagagtccatttcctcagatggtgccttcttgctgtgtcctcacatagtggaaggggcaagcaagcttgctaggagctcttttataaggacactaattccacttatgggggttccacactcattacttaataattccccaaaagccctgcttccagataccagtaccttggtcattaagtttcaacatagaacttttgggagacaaaaaccattcagactgtagcattgaaggttattgtctgattaaatattaacctttccctgagttgatttgttaaggaacatttgcacaacggatatccaactccattccactgtcagaggaattggtggtctgatctggcatcctggggacactgcattgctctctctcctttcttccatcatgatataggatttgtaagttacaatggagctatcctttgtggcctggtgacatagtgactggcagtggtggatattccatgtgaatgatggctgtagacgtggtgaggtaggttgatgggttttgtcatcacttcttttacctgagatcaggttttttctccaagctgggaaaatgaacattgccacatccatttaaatcagagattcgctagagaaattgatatgtgtggttccataggcagtgccttcattttgacagttttctgggtctgatgaattgatggccagcagaggcagttaggtaggcagctgagcttacacaaaaagacctctgtctagaaggcttctaacaagagcctccattaaataggctttatgtgatgaaaacgtagtaccaaaaacactgttatatttctttattttaagcctatagtagtgagctcatattattttggaatggaaaaacagagaaagtaaaatatataaaaactgaataaaatagatatatcatcttcctgattctttgaatccagctatagtgggtccataaccttctgcaccagtttttgtttgttttattttgatttgttttaattgatacaatagaatttattggtactatgtttgatcactgagatacatcgttaaatatgctactgctgattcctttttaaaatacactggactgaaagtcctttgaggatagttctttgttattatgtctcatgttatcccctgcatgatgtcttccaaaaagtagctgctcaaaaacatactaattaacaaattagtatcaactgatatttcaaaacagcaatttttaatttataaaacactttcatatacatttcatcatttaaaaaatcaacagtaatttatttagtggtttgttcttattggtgtgtttaatcatgtttgacttactcattgcagaattaaattacgatgtgatattgcggtaatagttatacatggcataaaagaaacgaactcataggaattattcacttaactcgcgggatcagaaaaatgccaatgtactaaatgttagcctaataactatgggcttttggtatgttgtttagaggaaatgacatcagttaatctggcaggatatcgaagtgaaaagtagttaaggggttctaatgtgtatcagtcagattggctaaattatactgcaataacaaatgctcccaatatttcagtagcttacaacaaaggtgagttatatacacatgcatatttagatacatgcacacacacacacacacacacacacatgaacacatacacatacacttacttactggaccaaagcatataggaataggttctatttaggtcatgcagtcttgcttcagagggaaaagaatggtacaaccatgtgaatgctcttaaagcttttgttttgtagtaatacgtgagatttctattcctttttcattggctcaagcaaatcaaatggccaaaactgatgtcagtggggatagtaatgtaattctttcatgcaagaagttgtaaatatttggaacaataaagacatccatctattactgttattatatgtagctggaattttgagactggggtagaggaatcagtcttattgattttgatccccaaaagcaacctgtacatttggcagaataaattttattcactacattttatggagaagaaaacctaaggctggaattatttttaaacgttttcaactctcatagctgataaatggaaaattctagatttgaactgaaatctaaatctgactttcttcctaacctcaatcgaaatccagtactcttcataatgtggccatgctgcatatgtaagtgtgtggatgatgccagtaactaaaatgaaaaatgaaaatgttcagtagaggatgctagagaatttgtttttaaattttcgcttaaatatttcatattcttttaggtgaccaatattgaacgttcaaggtagttctcactgtacatgggtataatcatgattttcagcattaagattctcattttagcatttgtgtgggtctgtgtgtgtttgcatgtgtgtgtgtgtgtctataatgtgtgtgtgtctataaatccaggttccttcagtcttacacaaaaccttaacaaaatgttcctatagatcctgctagaactgctgactttcaaatcaggaattagttctgattctgttgatgtaaacctgaagagagaagaaaaacataattcaccttcctgcattattaagatttcagatacacagtttttataaaagcttgcaagtgcaaaatttgctatcaagcctaatgtagcatggaggattttgtctgagctagcaaaggatcacattttcatctcctgtgagtcagggactgagctctataaactattttccacatatatgttctattaaaaatagtatctcattttgactcttagtctgtttttatagtgagcgggctctgaaccgagttacctgataaattactttctgtatgtgtgatatacatactgtctaacctgaacaagaacactgacttcaggtacaaggaaaaccagtactgcacaataaatgggctcaacgactcattcagttcgattaatgtttactatacattaagcactgtagtatgtaccatggagcagatgcaatgccattctaactactgaggagcttttattgaagagatgagttatctaatctttgatagatagccttgaaataggacttaaaagaggtgtttttttgttgttttttgtttgttttgttttgtttgttttttaccttctttcttgtccctgccataaccatgcatctcttgcattgcatagttgagaacagcagttccacaataagagagtcttgtttgggagtcagagattgagttactgtagtccacttttctatccttttctccctttgacatcttcttctgattaattagtaattaataggtgattgattaaatgattactttagtctttcatttaataaacattattgaggacattctatgtgtccaacactgtgccaaataatagagagccaaggacataagcatagcccatatccttcattttaagtcaaatgagagaaacagacaagacaagtgtcagtgttgatgccacatgaccaaagccatgtcaagtataaacattttatgtaaaatgtagctattttaggacacagggaaagagtgacttttccgcacttaaagggcctggtaaggatttctaaatgaagtggttcttgaaataagtcttcatggatgataaggctaattacccagataaagaaagggggaatgcattctggacatgtacctgccattgcattcacaaaggcaggcaagaaacagcaggtccaggcatgcaggacaagtagttaagcttggtggaaatatgggaaatttgggaggaggagaaaggttgatgatagtggacaggtaaagacagaagtcatattttcatgaagtgcttatagtccgtgtttattaatctgcatcattctggatgtatatatggaaacctactcaatctaacttgggaaagaaaggaaaacctgatgaaaaatacacagttgattcttgaacagtatgggttttaactgcatggatccacttatacacagattttcttccacctctgtcaccctgagacagcaagaccagttcctcctcttcctccaccccctcaaactactcgatgtgacgactatgaagatgaagagttttatgatgattaactttcacttactgaattgatagtaaatctacttttttctatgattttcttaacattttctcgtttattactttattatacaaatatgatcaataatgcaatacatataacatgcaaaatatgtactgattgactatgttactggtaaggcttctggtcaacaattggctgtaataatttagttttgggggagtcagagtcctacctggattttcaactgcatgggggtccacactcctcacccccacattgttcgaagttcagctgtagaatgagctctcggtgtatgaacataagactacaactttgcttcaaaaacaggcaccaaggacaggaatcgcatcagggacctcaattctgctgttttctcatggcttttttattctcctctttatgcagaactgcttactctacttctctaatctacatgatggaacacagaagtaagagcatctaagattaaatcttacacacacaattgcctgaaaagattgaatacttttctatgttcctcttacaaattcactttgaaaggaagtctgtttggttagcttgggtctggtgcctacacttgcactggtgtaactatggccagggtgtgagttgtgtcataagagcatttttcctgtgaccatgagactggagaggaatggttgcattggaaatacccagagaaagacactggaaattttacaaaagatacccattatataaatggtcccaaatgccaatccacagagagggtgcctcatactaacttctgggagtttgggaaacatactcagtacttctgggggtttacccactaagtattctgatttgctagatctagggcagggtctgagaacctgattataaaagttcagtaagttattctaatgcctagatagattgggaaacattgtaagaaatttagaagagaggaaaccttaacaagaaaacaaaatcctcatgggatcaatttgcgtcatagtacacccactggcaaatagtttgggagagagaggctgcaggtgaagcaacttcttgggagtgcattgcagtcatccaggaggggagaaaggtcttacctaaaggaggagccatgcaaacagagaggagggctatcgggaaggtggagtaggcagttcgttgtcatcagttgtatctgaaggacaaggaatgcatctagaacaagtcccatgtttttggcttgggtaatgaggtaattaagtgatggagggggagaaatgggacttgtagtagaggatgacaagctgggttttgacatcttgtgtttgaaatgcctacagggcctccaattgtgcaagtccaggaagcagttgtatatatagggattctgagctaaagataatgcttttgtaatcattgtttgcaaatgatagatgaagacagtgtgtgcagatttcctagggtggatataattaagaacaaagaaaataagtctatgaatttcagagacatacaaaaattaaaggggattgagaagaatggaatagagcaaccataaaggagagacaggctgagcggtggctcatgcctgtaatctcagcactttgggaggctgtggagggtggatcacctgaggttaggagtttgagaccagcctggccaagatggtagaaaccccatctctactaaaaatacaaaaaattagctgggtgcggtggtgtgtgcctgtaatcccagctactcaggaggctgaggcaggagaattgcttgaacctggaaggcagaggttgcagtgagctgagatcatgccattgtactccaatctgggccacaagattgaaactccatctccaaaaaaaaaaaaaaagaagaagaagaagaagaacaaagacataaacagcagcataatagaaatcaagggagctcgtgtctctaaaggtggagaaagacattaaagaagacagtattagccaatggtatgaaacacttgttgcaaacatgctcattggatttggctagtgacaagtcagtgattaccttgagaagaacagttgtattctttattgttatttacatacatatctgtcttccctacctaatggtaaacttcttttgcagtcaatgagtaaacattctgaggggtgggaagggagttctgaaatatgtaatttctgactcaaagagctcacaatttaatggaaagacaagtaaaaagatgataggagaaagtgagagttgctgatggaagtctaaacaatattaggggagccctcaggagggatatctaacctctcaaccaagtaagcactcaataaaagtttattagcacaaaatacatgctgggacaaaaacaagtggtatcattagaaggtgcacagaaacaggagcatctaatgtgagcgggtgtgttggtgagattttgttgagggaagcaacttcttgtctgtttttttatatgctcgtatttttcagggtttcatcataagcacactagcctcctgtggctctacacagacacctaggactatttcatcccacttcagtaattttagcttttgggccactaactccccagtttatgtttctggccttccctggacaccagatctatttctccagctgctgtttggatatttcccccatatatctcacacatacctcatattaacaaggcccaaactggactctgtatccaacttcatattctgaatttctactcctaaactcattatgcacctattcactagatacctaaaagctgtcctagattcctccccctctcttattcctcattgtttgcagtttatttgtaatgtcttttatctgccatgtgcatttatgctgccactgtggtagttcagactgttgttccctcttatttgcattattgaaatgagccagactgcctgccttagatccccctgtcctctagtgcaccctgcacagcatgcccaatctcacctttctatctcctttaagcccaagtcctgcttcagtcatggatgatccatggtaaggatgggttatgatctaagcacttagcaggtcatgaaacatcttctttacctgttttcaatctaggcctattcagcaatatttaacagaatctaaatttttcattctttgtgccacacagtggtccaggtgctaggatgcaagcacccttgctctgatgggactgccattctactgcagactacaacaacggaatggaaggttgaggatctagtgagtgtctgaaagaaggacctggagggatggaactgtgtaactgtgcatctggtttggtctgggtgctgtggtggtatcattgaggcttctcaaaggaagctgtgctgaggctgaggcatcaagaatgaggagtcagccaggcaaagttgtaggggagcagggcatgtgccaagatcccaagtggaagagagtgtgagatggggaagcggggccaaggctgagagaggagactggtgctcagcaggggccagatcatgttggcttgggcatgttactgaaatgccaggggtttggtctaggtcctgttgcttgctacacagaaagccaaccaccaagacaacgaatgaagccaacaaagacggctttattcaggtgtcatcagcccaggagacagatcagtcttaaattcatctttccccaatcaactaaaattgggggtttctacagtggaaaatgaatgtagctacatgcaggaaaataggaattaaggcaggtaagggagcagtcctgctgaatgaggggtctggcatctcattgtctgcatgtggtgacctggtgagtttcagttcctcgacattatctgggaggcctgagggtcagtttcctgagaaaggaactcagataaaacaaatgtcagtttcaagctttaagactgggagcattaatttccatgttaattaaaaaatacataaacataaattctatagggaaattgggccagtttcagggggactgccctaaagaatttggactttctcttatgggttgcatcacacatctgaagagttttcagtagggacatgatcaatctgtgttttaagtacaggatgctaagggttgtgagaggaatggattggatgagtccaaaagttaaggaaagaaaagcagtcaccctgctgttcccctgaccccctcccctgcacctgccatacccagcacagcgcctgacacacatgtagagtaaattaatatgtacatatccactacaagagatggacgcgctaggcataacagatgtctgtatctgaaatgtgggttgttcttttatatcgcctgccactgtgcagttccctctacctgaaatttcagctcttctctgtaggtgctggaaaactcccgtccattcattaagatgctactcaaatcccacctacacaccttatcttctctaatccttagagcagccatatgaggcaaatgttttatctccactttacagttgaggaagtggctcagaaagattaaggacttgcccagtgacacatagtggtgtcttgggatttacagctgggtcttgtcgtcttcatacttgctttacccgccactcttcaaggttcctggaagcatgagtgattaaggaggaatcattgccagttcggtgtcattgctgccagccccctctgaggcacacctggctccctgggagtgtgtttatgctctgccaggactctccccagcctgcattctgaagcatctccttccttgctctgccacatccccgcccctctagatggagggaaacactcctgtaaatgggaattcacccaatagttcatccaaacatatcactggcttcctacctttctctccttcccagcctggacaacccatagcctccatgatcaatcactttatgaacatggtcagcttcaccatggcctctcctgggctggctgctaggctggcctaacagctgcagctggactctaccctgggcattttaaaacactgttacctctgtttctttgatattctctgaggtctaaagtcagcatacatcacttctcctgcttgtttgggttctgtatgtaggggcttgacagccagagtggctttgcagaaactcatgcccctggcccacccagcctctcgccctgcctggagggcagattacccctcagtgtgcttctgctaggaatggccatactgcatcattcctgttcctctgtctatgacttctgcaggatgactctggctttttctgggtacgtgcggaacactgggccaggctaataagtttagaagaagatttaagactccagatcaaggcacaggatcacattgtctcagtaatcgtgacttgaaaggaccctcgatgggcctcagctaagagctggcatggtggtggtgagcatgcgggcagtgggtttgcaggcatagcacaggctgtggctggataaaaaggtgttcacaccatcattgacaaattttctgaaccatgtggaacacttgtaatgatctgaactgtgtttctctccattttcttttcctttttatcttttcgctctctttcttttttcttcctggaatgcagctgtcacaataattggaagatgcccttgaaaaagtgctctcgagcctgtgattccctggcagcttcatttttcatctttccaatgaaggtggcatttgcccagaccctgttagctatgaggctgcctgtagaaccttcaactaccattgtgtgtggtgaatagtactggggttttggcatttcagtgctttgaactgctgaagaaccctaaagccaggctcatatgcacctctcctccctctctcccacctccccttgcttcctttccgcccctcccctcactccctggttcttccaccccaggacccacctttgctcaaggcaacccctcccaccccatggtgttcccctcctctttcctggaggccttgtaaatgtacagaccatttagactttaagacagtggggccacttttcatctcaggccaggctgctgcctggttttacggggtcataaaagtcctgacaggagtcataaaagcctccaattgcactgcagaaacccttggagtatattttaagggcccctgagttttcattttgctgcttttatggggactcgtaaaagctgcgtggagtgagcccactgattggctgctcagcacggaggtagttaaaattacagctttagacaaattgttccagtcccaataaatcagtatccggcatgtggcagggggaaggcttctagctctgctgcatcctgggccccccttgtcctaccacacaggcaaggctctgcttggggccaccctggccagccctccaccatttcctgaagccattctttgcaaaggggatagtacttaaccagctgtttttatgcattttaccacgtagctggttgacttttttttaaatttccaaaaacctgatctttaaaaccagattgacttatttttcaattcaattgttagagagacacaatctcatactccgtcggtcaccctggccacaggtactacagactacagcctgctttctccccattggtccccacatcccatctccctatacatggccttcttgccttaccttctttctactgttgccttggtatatctgttatacccctacagtgggccagtgcagggcaagaatgatcggtggggatgccattctcaggacccatcctaatttcccactggttatgcctggcagagaaccataccagcgtgggtattatgggagactgctgtgttttgtgccatttcaactttttaggagcttgtggctcaaatatatcaccagtctggcggatttccaagacactgattggagaagcagacattgttttctcttcccttctttccagatccagaatcactcagccccagctgaactgccatgctgacaacctgaggatcaagcatactcttcatttgtgatgtggaagtttaaccattaccatcgtgtgtgctcttccttcgcaggtggagaaagctttcaggagaggctctgagggtgcagaagcaaggaggggtccctgcaatgtgctactcctgtttgtgtgtccgcctctgttcccatggcaaccacctctttcccttgctatttctaaaaagcacgtgtgcttgtgggagtaccattctgaaaaaaatgatgcttactcctccctttctggatcttagccaagtcaataattcaagcagcacgaggtatcttagtacttgagcaatgcccgactgatgtcaactgttaggagagccaactgaagtagggagaacagtttggggtaagaaaggaagaaaagaaggtactgtcaagctgtgggttaggagaaggcattagcctgagaaataagaccaagatacatgtgaggaagactccaccaccattagttcactttcagagtcatggctggtagatgctcccttccttccagagcagggaggaaaagggacgcagtctttgctgcaaatttcctgcataagttagtggagaaaacaggttctcttctgacatatgcctctgttttgaagagccttgttcttttcttaaataaatgaaccaatcacaaaggttacaggctatgtgagagaaaaacacatcttatttctgtcttgctctagttttatataattattatatcaactgtggctgatcaaagcattcattaaagagaaactatctctcccatgcttttgttacagtttggagagatttgacaggctttatacatctctggctatatttccctttctctttttcacggttgatttcgctcttcttcctctcctcctccccttcctgcgtactagtgatttctaacatgactttttttcttttctttttcttttttccccttccacctagcctaatcaaatctctcataagacatcaagggaaccctgaaccaaagcaactcttggagttatatcggtacattcaggtgagcacaggctgacttcctgcctcagagcagccctcagcccacctggaagccaggcaaggcttctactgcacacactcccagacagtccctgcctttcccattgtctttctcaagggctctgatttctaggctgagcttactgccctgttccaatagcctcctcccaaagataggcacatatctgacactcctttgtcaatccttgggggagttctgtggccagcaaaagatttccatatcatcaactccttgtctctttgcaaacgctcatctttcaatgtggtttttgctactccttctttcattatcctcatgctattcttcctgaggaggttgtttcagtttatttaccataagcatgttcccaaggggatttcagccatgcaaatgaattacggaggatatgacttcaatgtgcaaagcatttggggtgaatgtgtacaagtacatttttcatattatgtgcccctctatcccattgtgtggcatgattttatctcactctgttctggactaatgacagactccttcagacatttataaaagtctgctttgatcgttcctctatatttcatcttgcatttatttgttcactccctcaacacacaaagcatagactatgtgctgagtaccatgctggtaccaggggacatggagataaataagaaatagtctctgtcatcttggaattcataaacaaatagaacaggaaaaaatgtaatcaattacttactaaacactgtggaatatgcaatgatatatcaggaggaagtaagggtaagaaatgactttttactggcgtttatcttacctggatttttctcaggaggaaagaataaggaaagggcattccaggtagataaagcgaagtaggaaattcccagaaacatagaacagcgtggtatgtgtgtagcattcatagtcatctgccaaagaagaataggtgggaaaggtcttgagcagaaaagagtctgaagaggaatccaggaagcatattgtgaggagcgtttgttttgcaggttgcaaaacatgagtttgaggttgctaaagaaaaaaagcggcattgtatgattccatatcaaagtagggcattgtggtccctttaagtttagcaaatactgaatgcctgctgtgtacaagagtatactgggtgtagaagaaatacaaagatgatgcaaagatggtatcttagtaccactttttaaggataagaaattttcttgtatacatagggcataaacatatataaaggctgatttatagtaagctgttgtgtgaggccattctggcattactataaagatatacctgaaattggataatgtataaagaaaagaggtttaattggctcctgtttcttcaggctgtacaggaagcaaagcatggcaccggcatctgcttggcttctggggaggcctcaggaagctttcaaccatggcaaaaggtaaaggggaagcaagtatctccacatggtgagagaggaagcaggagagagagggtggggaggaggtaccataccccaacaacagatctcatgaggacagcccgaagctctgagggatctccccccattacccaaacatctcccaccaggccctatgccaaacactggggattgtaattcagcataagatttggcagggacatgtattcaaactatatcatgcatatacacacagacaggcacacacacacacacacacacacatacacacaatcggtcaacagtgtaaaatgagatgacaaaaccatacttgagcaattgccaaatgatattaaggacaaacaatgatggatgtagaggagagtgtaattagacaggtatggatggccaaggaaagctgcagagaggaggcgaatgagtggataaggagaatgggtaagatatggagaggtgaagcctcatgtgtagaaaaacttgaataaaagcaatggcagggacagccaaagaggaatcagaatcagttaatgaattaggctcacaggggtggagagttgatgctgtccatggcaaccggggctggaaattatgctgcctgaagagggtggaggctcttcaaatgtccgattaaaggtattggacttttctccattggcaacagagagtcactgaaggttttgaatagggaagtgacttggtatttggctggacttgtcttgtgagctatttgtggcagctttactgtacaaaagcgatgaaatttaataattatttagttatttggaacattaatatgctggtgtatcatatattttaataagaattcagaaatgggagttttctaataagcaactgagttgggaaggtaacagaaggggaaattttggttgaataggataagaatgagaattttgagtgtcagtgatcaacaattaaccctacgtctcaattcatcataagcaaatacaattactactctgcaaatactatgtagaagaatgaaatgatgtgttggtgtctgtcccccaaattggaggcttctggccattgcttgaataactttctgcctctagtatccccaaacttatgttttgttttttctttttctcttagtatccatgcttctcctgaatcattcctctcgttaggaatgtcagtctactaaattttgtggcaatacaatgcctgggtttgaattcaagttctgccacttccttactctgtctctttatcaataaactcattgggaaaagtggaggaaatcatagtaacgatttattaaagttgaagattgagttttatacatttaaagtcctagaacaaagcctgcacatagcaagctcttagccaatgttagcagccattattactgtttactgttaataacagaaattactattaaaaaagaggaaacaggaaaaacctttgtcttcaagaagcttttactgtccgcctgtcaaagttcctgagcagcagctgatttctggcttagaagttagggttaggaaagtaactagtgagcgcactaaacagtaagatgcgctgccacagttgtgtgtgtaattgacttttatagtcaattctgcttatatttcctccttcaccctaatgctagcccggttctgagccagagttatttcgctctgccagtggtgcacttcagaaacacctggaggcttgttgaatccggattcctccacccacacccttagagtttttttttcttttttttttttgacaggttatttgttgcccaggttggagtgcagtgacgcaatcacagcttactgcagcctcaacctcctgggctcaaatgatcctcacacctcagcctccctagtagctgggaccacaggtgtgcaccactatgtctggctaatttttaaattttatgtagagacagactgtccttatatttcccaggctgctcttgagttcctgggctcaagcgatccttctggctcagacctccaatgtgctgggattataagcattagccactgcgcctggcccatgatttgcatttttaacaagttcctgggtaaaactgatccttgtggtctggggaccacactttgagaatgtgctttcagctcagctctgttgttcactcaagaagaaaaggcttttcctggtaggtctgtctgtagctcaatcacatgtcccacatggagcccactctttcccatggtacaaaaccctccttaattgcctccttggaatctacacagagaaatccctgagctttactttttctggacctgccacttacagaaccagcttcattgagatgttgtttaaaattgatttctcacctagccacacagattatctaaaaggtcaagattctcatgtagacttctttttgaacattctttagccactcgatggcccagagccccatcctcattgttcaggtttcatcgtctccttaatcaaccattagcataatgtattagcatatctatagcacaattatattttgattgctgtggtcccagtcagactaaaggctgccttcaacctagatataaataatttagaatgtttataccaaagggaattataggggagggaagggaagaaaggaaagagaatatttgtgtgtgtcaggggaatgaggggggcattgggagagtaaagatggtggcaaaaggtaacttaggttgccactttttaccacaacacttttctaggctattctcaataagaaaatgtgaattatatatattcaaaatacagataccattttgaattgctttaaatccactcctgcctttaatctcattacatctgtcaaaatatgtctcatttactaagtaaaaagtagaagctggtttccagcacctctttctttattatagcctgatccctgtgcaaatgcattttcctgtggttcatctttgaaagatctctcttctcttgtctggttaacttcctcaatgaccattgatatctttgtgctactttattgtccacttggaaacctgatttccctttattagtgtcctctgtaataggttagcagaaatcttatatggttccaaagaagtttctctctctttctctctttctctctctctctctctctctctctctctcacacacacacacacacacaacacacacacacacacatagacacatacacaggtgcattgtatcagctggaacatcagcatatgtgtggtaggatcacaatcattcagagcttctgatgttcatggtacctaggggattgattcagctttcaaggagctgtggacagtaagattaaaagaactgctctccttggggacttttaagtaatgacattattggtagtcctttgagcagcatggagagatgtttgaaatatgaaattgctgacagttttaatagttgcatttagaatggatgatatttgcaaaaattgctacttctttaccttaccacgcagaatgacaacgggatgctaggactaagccaacttcagtattcttctgcaagtgatgtgaaaacgttatagttgatggctcaggatcagtgcagggatggtaaaggggcagaggatggcactatgaaatcatagtattgacacagctggtcattagattaagcctagtaagggagtctaaaaaaatatcactctccaggtcccatgcatggagattgtcattctgcacctctggggatggaatcccatcagctgagtgtgatagctggccagaattgagtagtttgggtttagatggtgtcagaaagactggagaataaatcttctcttgggtgatgaatatctacaaaaccttaggtaagacacattttctgagtctcagtttccttattctgtggacattgtctttactggatggtagacgacttgaaggcaggagctctgttttctctttgtcatcagctacttgcattgtggcagacagatagatagtaggaccctagttaaatggtttggaataaatgattgaatgagtgaaagatgaatgaatgaatgttggaaggaagggatatatgaatgatatctcatcaatttgttgtgtgtattaaatgaggtaattttatgtattactcctgacagatagtggggattctaagaagtttccatctcccttttccattttcatatcctaccatccaacatgctaattgtgtggtgttgttttcatatttctatctcttccttttctctttttgagagaggaaagaggtgctcagtccttattcctcccattttctgtttcacctgcatctgcccacagcagtttccttagcatacattattagctcacctagacttaacaaactacctttctaactcaaatccctcctgtttccctaaagaaaatgcttcttttttgttagaaaattttaaaacaacaataacctaggttttgaagaaataaaaggtaaagattttaaccacatttgcgtgtttcaattattagtgttttccctgtggcccattcatgtggataagagacatctctgcattattatcttgtcagaaatacagcccctttcccttcccctcatctgattaggcatgcttctctttggaagcctcatcccatttggctaatgcatcttgacaactcctttaataagagtgcttggtgttcgcattcaaggatgtgtaggagttgacagaaatctaccttgtaatctttccatggcttgaaaataaaacccagggagacctagcacccgcatctctcaactcaaaaatggcgagaaagcttgaggggagagggatggccattgatttaacagaaacagttttatttgtttgtggtttttttcccttccttctgtgtgaaaaagctagcagagggagggaaaatttgggaagcagaaaatgtttcaatctacataaaaaagaggaaaataataacccaacaatgagaagagccaagagaatatgagaaggcagcctctttttgaaatagattaaaggctttattgcaagaacatcgtaggacaaaggtgtctctgcaggactgggaacttcagcaaagcacataaaacctcattctcagacttaaagacagccctggaagaggcagtccacaaagcagtgtgtgcctaggcacctattctaaattcaggagagctctgcagtcatttcctttgggggtgaggcttatgaggctggtgtaatcagggatataactaggaatctcctccaaagaatgagtgtagaccaggtcaaacagaactattgtgatgcatttgtcctccacagtatcaggatctcaagccccttgtcctctgtggttatagaatagcctggggcaccactgtgggcctatggtgatcatgggtgccacttcctgagcacttcctgtggtaggattgtacttcctcctttgtggagaagaacattgactagtgctggccaatgagaggcagctacaaatgacgtgtgtcaccctgtgggtgggctaaacattttacttccagtgcgagaccctcctgggcactctctttcctctgtcatgacatccagtgactttcaagactgtgactgccccactgggggttcctgagtgaatggatgaaaaaagctcctccctgtcacacctgtgatggatgtctactgtgaatgagaaatagtcactgagactttcatgttgttgacgatttcggcataacctacttatcctgactgttacagagtctgatcttaatgcaaaacctagccaggaattgaaggcttttattcagtggccctttatttttgaaggtgaacattctacagggtagtttggataagtggcaataagggaatggtgctcattcatcccaggatcacttaagagcacaaataagaccgccagctgatgccaggctgcacagcaggacactaggtcactaggagagtcaggagggcataactcctgctgagcgttacgaagcacagcaacttgtgatttggggcctgtcaacagctatggactcagtaaacagccctgaaatgtgaggtttccaggcagatatttctgatgctctcttttgttgcagcctgctttgctttatttatgcaaagagtgtatccctgggggaaaaatcaagtcatatcataagtgcatcagagaagcttactatttaaagaaatctatggtgaatccttttgtgaaggaataatcatccacctgatttgcatttgctttgtgaattgtgtttgtgtatcaggttttatgagtttggggcacatcataattcagagcatcaaacatagagtccaacagagctggattttcatctcaggtcagctaaaacacaaagcttgcctttgtcctgggggacaaagtgaggggccaactgaggatgaattttttgcctagaaatctctgcaacttgagaatggaggtaaaaggtagatggtgagaataaccctggatggagttagagttgatataagggaggtcaaagaagggaagggctatgaggagtagaaaggaaaatgttaggtgggcgttgcttcgattttagaataagccttatactgtaacaaggaatttggggaaatacacctagtcctctgttcaggccccaaatgaagcaaggcaagagggggcacagtgtgactaagcagggaattggggttagctcttgactccactgtatggggatcatgacgtggtggactgttgtctaagacagatgagagaacaaacgctcactttacccctcgccacttatgggatgcatctctttggacaaggtttgcatttgtaaaattctattgtcctgactttaatctttctgagtcttggttttccatccatatgcttaaggtctttgtccctcctggcaggacttgtgtgaggatcaagagaccatgaatgtcaagtgcctaatatagctgacctcagataggactcaggaaattaaaactatcaatattgctgactatgtatttacttttttctaagattctgaatgttaaagcgttagtatagtgtggagtctatgacaggtttttatagatatttgtggaaagaatgaaccatctagtagcctaagaagtgtggggaatgaacaccagatgtgagtgctgaggggtttggagcctctgtctgtgaatcttatacctttcctccctggcattacaaatgctccccatttccccctgaaaacatgtctgtttcacagaatccacattgctcacaaagattaaaatcattttcaatgactccatggtttttgttttttttgtcctttctgtcttgccacatcaggttatctgaccgtttgatttcagcaactcaaagagctcttcatttttttcctttctttccttttttcttttccttttctttctttccttgttttcttttttttttttcctgttgtcagagccctaggagtttcttttccctttttaattaagagcgaatgaaggtaacaaaatgttttataactggagagaattcaccagcaggacaccaaggcagaaatccacatcctgaaagaaaggcaggcagacaccagatcagcgctgtggggaatgtgtcctgcacacactctgcttcccgctgactgatggtccagccctccctctgccatcagcctggaagctttacctctggcagaagtctccctgtcttttgttaggaaaagctacaattggaaacctgcttttctaaagcatttttaaacacacagtgtgctcccctgaaatacgcctgtgcctgcaagagtcctgtaagttaattcctgccacccagggaagtgtcctaattttccctgacttttactgacctactcctcattgtgtacctggctgtctttaagctgggggacagtttgagattggaacagcaaatttcatgggagagcctgtcagatgggtatgtatgtgccgatgtaaagccagattgagcctaagagaaagagtgtgagcagaagaaagggaataaaatcctactgcagacagtgatgtggaaagggatgtcgtttctggcactgacactgtgcctggtccagtgccctggctgtgccatcccggcagctctgaggctttctgacagtcctgagaatggagcacaagcccccagggacgtctttggagccctaattccggtgcactgctttcgtgcactctgttttgcacgccacacttggaagatggcattataagactgcttccaaggaaagcgtgcttttattaaactcctagaccaaattgcctccctgttgacctctttctttgtcatgagacgtgatgggttattacatttgtgattaaaaacatccgtcatcggtgtgttttgccttttcaattttgtaggaaggtgatcatgatgctggttctcagaggaacagaaggatggagaagagagaccatattttgtggtttaaggaacttgcccctcagagaaggttaccctttttttctgagttcactgctgaatgtgtggctcaaatggccgtggaaggtcactgagctgaccgaatacacgttatatcaattctgcacagcatgagtgaagaaaatggacagacaatttcttaagtcactagattgtagagatcaatacagataattttggaatttttagaaaatccaaacacttatcctcaccacggctgttcatgtaatacctcagcagcttcttgcttcatattagctttgatcttactctctatttggaactaagtgtttcagaaatgatttctccctcctataaaacatactgaacacagaactgagttcttcaaactcaacttatgtatgacaaagctatagccccagcttttagctcaccttggtaactccgatggtggagaagacaaggataaggatttcttttctctgaggctagactggtgaagttataggatgacagatacagtctaaaggtcagtccctggctgctcttcccagagaccctctgcctcataccttcccagcctctagtctccagtctgctcggacctctgctatacttctttgtgctagaagagtgatttggtcatgtctctcctctccttgagcaaaccttaatgaattttccctccaatggccagtcctgtcttatcttggcatttgaagctctttattaagtgaccatttctactgtctttttttttttcctccattctcttctgctaggctctaatatgaactctttacggcaactgatgctatcacagaaggacctcttgtacttgctccagtctggggacttggtcaggtgtctttctgtctccctgtaaagcgtttccactctgcatttttgcctatcacaattgtacagtttcctgaaggcacagctgtgtgctatctctcttaagaattccctgatggaagtatcatttattggtgccaagtgactgaggttatattcgcagctcttggacagggctcctagactccccttagtctcagttacttatctgtgtataaccactaagcacccttcatcttactcccataaaatgaaagtgacctgatatttacatgtcgatctcgtatgggcattatcacaatgtatgctctgtggcattgagttgttttcatacatgttaattataagcaccagcaagcatggaaccatttcttatatgattaatatcccttataacaattaggtctacaatttgtaaaatttgttccattaaatatgtgattgaagaactgaataaagtcacctctagtgaaaattctacttgatattgatactatgatttgaaaaataataaactgagaggggaactccttgacaacagtttactgcactgtttctaacatttaacttgaagtataaataaatggattttagcaaatcaacctctctttgaagttaactgaatgctaactgtgttctggaatgaaagggttcatgcatctctgttaagaaatggaaaacagataatggcagcggagtcaataaagtcagtgcctcatcttgaactgggtgagcggtccctaaacatttgttacgtagtttcttcagcagactgtttatgtctaatgtgttctttttttcttaaaagaaaaggatatttgcatttttgatttacaattttattacttactgtgtacctgacctttacaagcattatccaaattaattcttataacaattctatgacttagagttataatgcacattttaaagttgagaaaactaagggtgtaagtaagttggcctaggtcacacagctaagtgagctgtagagcaattattccaacccaagcccatctgattccaaaatttaggttctctctagtacctcaagtggtttctacatgtgctctacattttcctgcttcttggaatctgtgcatgctcattcctaagcttgtaataccttttccctattctgtatctcagaaggtgtccttctttattcccaatccctgttctctctcagtttggaagtaattgttcttttattgcaaattctcacagcacttagatttttatctcaaactctttaatgtaattaattgttttcatccatataatatagtcatgtgtacctttatgtaccacatcttcctttccacataggaagctccttgagggcagaagcgatgctctttgattcattttgtattcttcaagatggactagaacagcgtagtcaccttgtaaacctatgtggtggatagggtcggggaagaaaggaaaaagagggaaaaggaagagaggaagaaatcaaagaacgatagaagacagtatataattcagtgttaaattgtgtggttcagactaattataaattcctttaaaagaaatgcaattttattactttcaagaacataaagttaattaatggctaacaaaatgttatcaagtagctgtcttgtcattcccactgtaattaatcaatgcttttggaatgaaaaagtggacttaagcctagcccatctccagattattgagaattttaaattagcacagtctgaaataatgaggttatcgccaccccttggttaaacagacgtctgaagatgaaagcatatgatgataaagaagacgtataagaaatttctaaacatgttttttctctttagtggtactaataagggattccttaattgttaaagcgcatacaggaccttatttgccaaaaattgtagcacatttgcttagaattttgagttatttcttaattcctcttctcttgattaatttaatggctcattaattcattttttaaaaaagagaatctaaaaaggttatttagaacaagctaaatccatacacagtagtgaaggtgctgtagcccatcacagagtgggtgggaagaaggggctagaagaaggatctagaagtggtaggagaggatgcaggagccattcagaatacgcatcaggaagaggaagcactgctgagtagcctcaggtttctttcttaggtgacttttcggagaagattagggaatgtagagggatagagagatttgtgaggaagaatatggagttaattttggacttactgtgtttgggatgcttatgagatatctaattggaattgttcatggagcagttcacatacagatctgatgctcagaagtgagggttacttgaagataaccaattttcgaatcactgacatgtagtaaaggaagattttcacaaggggcagctgtgtgaagtcaacagagactagaacaaggaagggtaccatgaagattgaaggtaaggttcagaagaagttgaagaaattgttttgagaagtgatatccaaagaagtcagagaaccacttgaagagtggtgtcaagaaacctaaaagaaaagatttttaagaggggacctattaaataagaactgaaaagaagccgttaaatgttgtgcttagagagtcactgatgctggcagcttatcatcctagtggaaaggaagcctgactggagttggttgtgaaggaagaagtgagaaagtagcgatgtctgtcatagaccattctttaaagaaacatagcagttaaaagaggtagctagtggaggacttgggagaaacaaggagatttgggagtaaacagaatctagaaaagtggtggtaagatcagtcttgaacagggacagcaccaactcccctgctgagagaagagtggcatagtcctgaatgtttatgacttcaagatagatctgatgaagagttcagctcactatttcatttgtattagctttgtttaggcatattttatggaccataaaatttatccactttaagtgtacaattcaataatttttgtgttttttgttgatacatagtatttgttcatgtttatgtgatacatatgatattttgttacgtgtatagaatgtgtagtgatcaagttggggggtttaggatagccgtcacttgggtatttatcatttctgtgtgttgagaacatttcgagtggtatcttctagccatttcgaaatgtacagtacattgttgttaactatatttaccatacactgctattgaatattagaacttattcctatatcgtatgtccttattttttattcctatatccattagccaacctttcttcatacccttcctctccaccccttcacagccctcacatccttcggtaataatcattctactctctacctccgtgagatttttggctcccacatatgtgtgagaacctgtgatatttgtctttctgtgcctgacttatttcactgaacataatgacctccatgtcaaatgaaagacatgatttcatttgtttttatagctgaataatattctatctattctattttgtgtagatgccacattttctttatctattcatcagtcgatggacagttaggttggttccacatctttgctattgtgaacagtgctgcggtaaatgcgggtgcacagctatccctttgataaactggctttttctcctttgaataaatacccagtagtgggattgctggatcatatgatagttctatttttatttttctgataaatctttgtattgtttccatagtggtcgtactaatttacattcccaccagcagtatgtaagagttgccttttctctgctttctgcattattttttgtctttttgataataaccattctaacctgggtaagatgatatcttgttgtggttttgatttgcatttctcagatgatgagtgatgttgaccatttttttcatatacctgttaatcatttggatgtgttcttttgagaaatgtctattcagatcatttacccgctttttaagagaattacttgttttttttttttttttttttgctgttgagttaagttccttgtgtattctagattatttccttattggataaatagtttgcaaatactttctcccattccacaggtgtctcttcactctgttgattgtttctttggtagtgcagaagctttttggcttaatatggtcccatttgtctatttttgtttttgttgtctgtgcttttgagatcttagccatataattcttgtctagaccactgtcctggagtgtttcccccatgttttcttctagtagttttatagttttagttcttacatttaagtctttaatccattttgagatggttttttgatatgatgagtgatggggtctagtttcattcttctgcataggaatatccagtttttttcagcaccaattattgaacagtgtggtctttctccaatgtatgtttgtggcaactttgtcaaaaatcagttggccataaatgggtggatttatttctgagttctgtataatgctccattgaattatgtgtctgattttatgccaataccatgctgtttttgttactatagccttttaatatattttgagtccagtagcgtaatgcctctgctttgttctttttgctcaggattgccttggctattcaatatcttttttaaagttccatacaaattttaggatttttttttctatttctgtgaaaaatgccattggtgttttcgcagggattgcattgaatctgtagattgctttgggtagtatggtggttttaacagttttaattcatccaattcataggcatgggatacttttccatttgtttctgacatctttaacttttttttgtcagtgttttgtagttttccttgtagacgtcttttacctctgaagtaaaatttattcttagatattttattttattttattttattttattttattttatgcagctaatgtaagtgtgattgttttcttgatttcattttcagctagtgcattcctggtgtatagaaatgctactgatttttgtatgttgattttgtattatgcaactttactgaatttttaaatcagatctaataggttttttggtggcatctttaggtttttctaaatacaagatcatatcgtttgcaaagagggacagtttgacttcctccattccaatttagatgccttttatttctttctcttgcttgattgctctggctaggacttgcagcactatgttgaataggagtagtgaaagtgggtatcctagtcttgttccagttctgagaggaaaggctgtcagcttttctcattcagtatgatgttagatgtaggtttgtcatatatggtcttcgctgtgtttcttctctgcctgttgttgagagtttttttttttcacgcaagggtgttgaattttatcaaatgctttttctgcattattgaaatgatcatatggtttttgttctttgttttgttgatgtgatatattgcatttgttgatatcgtatgttgaacaatcaatgattttttaaagtgaatgtatagagttgtgtaagcatcaccacaacccagcttaggaacatttccatcaccccagaaagttcccttgtggctacccacagttaacctccatttctaaccccagccttaggcaaccactgatatgatttctgtatctataatccttttctggacacttatataaatagaatcatgcaatatgttgttttttgcatctgacttcttttcatgtttttcattttccttcttattgtgtaataatattctattataaaagtataacacattttgtttattaattcactagttgctagacatttaaatagcttccagatctgagttattatgaataatgctgctatgaacattcacctacatgtctttatgtgaacgtatgttttcatttacattgtggagatccctaggagtggaattgctaggtcatatattaagtttattttaactttgatagaaactgccaaccttttttccaaagtggttgtaacattttacatttccaccaacaatttatgagttttctgttttctctaaatccttaccaacacttgttactgtctttattttttattataaccattctagtggatatacaatgttatcttctagtggttttaatttgcattctgttaatgatgaatgactttgagaatcttttcacatgcttattactactcatgtatcttcttgtgtgaggtgtctattcaaatattttgattatttcttaattgagttgtttatcttcttatgttgtaagaatttttatatattctggacacaaatcctttattagctgtatgatttgcaaatatattttcccagtctctgagggcttttcttttcattttttaaatggtgggttttttttgaatcacaaaattttaattttgatgaaagtcagtttatcacttttttcttttacagatattttttactttgatatctaataattttacaatccaaagttatgaagatttttcttctacattttctcctagaaatatcacaatgttagttcatacatgtcgatctgctgtgtattttgggttttgtgtttgacatgaggaaagggtctacgctcattttattcacatggatgttcagtgtttctagattcatgtgttaaaaacagtctttttcctcactgagttgtcttaacacttttgacaaaattcagttgaccgtaaatgggattcatgactcttgatttgctcctgtgaatgggattaattttggaatctcaattttatgttattgatctaaatttctaactttgcatcaatatcacacattcttgattactgtaattttatagtaagtttgaaattggatagtgtaagtcctacaactttggttttcttttgttttagttttttctatatcttttgcatatctatatatagtttagaaacagactgtcaatttgtatcagcctgctgagattttaatagggattgcatttagtttatagatcaatttggagagaattgccatcatgatatattgagtctttaaatccatgaacatggaatgccttttcttttatttagatctgttttaatttcactacacagtattatgtagttttcagtgtaggcatttattgctgtttaatttttctcgatgccattgtgaatggaattatcttcatttcatgttcggcttgtttattgtcagtgtacagaaatacaatagacttttgtatgccaatgctctttcctgaaaccttgctaaattgtttactagttctaatagttttttgtgcactctttagaattttccatatccagagtgtatcacctgagaataaggacaattttatttctttattcaatccttttccttctttgtccctctctccctctgtctctctgtctctcttttcctccctctctcgtttcctgtctccctcccttccttcctgtcctttctccctccctcattcactgcctccttctctctttcttccttttgtcccatattgcatgggtagaacctctaatacagtgttgaaaagaagtgtcaaaattagacattcatgcctctttcttgatcatgggggaaaacatttagtctttcatcattgttgtatgatgttacttgtggatttttctaaggtaccttttgtaggattgaacctaatcctcttggttgagaaatttttattgttcattttaaatcatgaatgtgtgctaaatttttaaaaatgtttttctttgtcttttgagatgatcatgtggctttaaaaaatttattatatactatatttcattaattgatttttagatactaagtcaagctatcatttttgcaataagtcccacttagcatgggtgtatgatctgctttaaatattgttggattcagcttactaatgttttattaaagagttttgcatctatgtttatgagatatagtaatctgtatttttattccttatgtttttgggctttaatattggatgaccctagactcatgaaataagttgagaaattgtttgactttttctatattttggaagagtttgtgaagtattgacatgttttgtttttaaatatttggtagaattcacttccgaagtcacagaagcctggcttttctttgccgaagatttttcattgctaatttaaatgcttgatttagttttattcagattttctacttcttctggagtcatttttggaaatgtgtgtctttctaggaattttcacatttcatataaattatctaatttgtcggcataaggttgttaatagtatggtcttctaatctgttcatagtctgaaaacgtagagtctttactatttttcttctctctttttcctggttaatccaacaaaaaatgtgtcagttttatcaaggagcttacttcttgttttattgactttccctaatttttttgttttttttcattctcttatcattattatatcacttgttctgtttgatttgaatttagttttctattccagttttttagatgtaagcttaggttattggttgagatcttttgcctttttttaacatagacgtttacaggtataatgtcccttaagcaccgatttaactgcattccataaattttgaatatgtcaagttggttgatagtgttgctcaagacttgtggttctgttgtttcttgacagtggggtattgaaatctccaactttaaatggtgactagtctattttttctttcaattttgtcaggtttgcttgctgtattttgagattgtgcttttaggtatgcatacctatataagtattacatcctcctgatatatgaactcttttatcatactgaaatatcccagcttgtctttgaaatagttctagtcttaaagtttatttttttctggtattaaaaaaatttcctttccaatttacatgccttctttcttatggttactgtttgcatggtatatatattcatcctgttacttttaacctctttttagctttgaatctaacatgtagaaacctgagattattaaatattttagatttttagatagcttataagaaattggatcttactttttttatccaatctgacaatctttgcctttattttattttatttttgtttctatttatttggtttttttttcagggggtacatgtgcaggtttgttacaaagggatcttgcctgacgctgaggtttggaatatgattgaatctctcacctgcatagtgtgtatagtacctgacaggtagttattcaatcctgtactcctcccctccttatattcccccatgtctattattcccatctttatgtccatatttacccagtgtttaactcctgattataagtgagaataggcaatatttgattttcagtttttgtgttagttcacttagggcaatggcttccaactgcatctatgttgctgcaaaggatatgattgccttccttttttatggctgcgtagtattccatggtttatatgtaccacattttctttatccaatctaccactgatgggcacctgggctgattctgtgtctttaccattgtgaataacactaatatctgccttttcattgtgatatttatattattcatatttactggtacttatttttatgactggatttacatttgacattttgctatttgatttctgtgtgatttctctttttaagttcctctatttcttttacattgtcttattttgtattaaataaatatagataaatattatagtgtaccatttaattattgtattaatattttgtctatttgagttaatgtttagtggtaactctaatgagtatgctacacattttagcttatcacaatctactttagattgatagtaactaaattctggtaaaatgtggaaaatgtctgaatttatccctcatatttgaaaaaaaaggtttttctgaaaactaaatttccggttaatagtattttattttccttttggtacttgaatatatgttatcccattgccttggccttcattatttcagatgtgaggtcacagccatcttaaacttctcagtgttcccctataatttttttggatggctatcaattaatttttcttatatggttgttttatttttttctttggttccaaaagttggatgattatatgtcaaggtgtggctctttttgtagttatcctaccttggatttgtagagttttttagatatctagattagtgtttttaatcaaatttgggaagttttcactattattcattgagtgtattttttgcttcctctttgctctccttatgggattcccattattatatatgctggcactctgaggctttgtttatttttcttctgtcttttttcccctctttttccaactgggtaatttatatggatttatttctacattcatggattctttcttctgtcatctcgaatctgctgttgggtcctccagtgagattttaattttctcattgtactttttgtttccataatttgcatttggttctctttatacttttgtttcctttgttagactctctacatatggatttttttgttgtcatatattcctttaatttcaaaaacatggttttctttagttttttaaacatatttataagaatggcttgaaatttcagctggtaaattcaacatctggggacaatcagagagtttctattgcctactttgttttgtatgggtcacagtttcctctttccttgcatatctcatactttttttaagtgcacgttttagaaaatatattttagcaaatattcctagcctcacttttcccgcaaaggttgtattttgctgtttttttctgtttatgtctttccttgtttagcaaactggctaatctgtggactctgtcttctttgctatgcatgaacagtcactaatgtcttagggattttttgatgtttttaaattttctttaattttatatcctgttttaattttcaagtctctcttcccataggttgccccccaggactgagttgacatccaaggcttaaacagaagttgtgctcaaccatcttgagccagttagtccccttctgatagatttgtgtatgggtagtgaagcaccttcaaagtgcggaccatttccaatgtctcctgatatttgcttcctactgagtcctgtcatgtcctttctgctcaggtttccagcttcagtgtcaactaagaatataggcctgacttgagccctctccaggctatggtgtgtttgcatgcagatttgtacttgcctagccctgagcagaacctggggtagtcattggccctcccctctagcctttgagagaatgacttctaccaacagtgccactggctgtggtgtcactcaccattcaaagtaagtgagcctctgaaccagggcagagatgccactggtcctcaggtattaccctaccctggaggaacctccatgactgagctggggctggagtcagaataccacagagccccacagttcttaaccgaagttcagaagtttcacaagaacatatgcttctcagattgttaagatttcgttcaattaccactccactggaatggttgattttgtcaattttgctcgactttatgctctgttttcttggacagaatatttgacagtcttctttctttgccataacagaagtcactggtctttatttagcactgttctcagacatttatatttgtagctttgggtgatgtttcttcagagtccgcatgatattcgttatcacagctctctaaatttgtaagtacactcttagtcccacgtggccctgcaaaggacactacccactctttgcgagttcccttgtgctcaactaagagccctctaacacttaggtccctagatcctacctctgactgtgaagtaaattacaagttcatgtttgttgaatataataatgtcaaaagacagtccctaatccatgcttctcttgaattccctggttaaactcaggggaaacattccacagacagctttatccctgaagttgtcatgtggactagatacctgtaactgcatggaatcaagtacagcaggaggaatctaagaaaatgtgcactgtggtcctttaagatttgaaagatgcaattcaaaggctgttaagaccttcagctggtgataattggatttgtaagtcagtgcaacatgtgataaaaatgctcctgctggatgggatcccggttttcttctatccttcctattaatgtgataaatgttactgtctcagctgatagggccacgttggctaatcagattggaatcaagtttgagttcctcaggctggctccatgtgaagctcatgggaagatgttaaaaaaatactatagagaatacaaggaggacctgggtttgcagaggggaaaattttactttgattaggaggctttgcagcgtggggaagacacatttaccatagaccctagtcacgtgctgccgcctgggcatgttatatctcatgggggactgtgggacattatctccattgttactgggcacatgccatcgtggagcctggggagaaaacaacagcagctctccatgtgggttttggggcagagaggagccaaaataatgttggaaaattaaacctctcttaattaaagctgatggcaaacaaacacaagtaataatgcactacagctgggaagcacaagttcaatatgaagctgaacagctgtgaaattgagccttctggtcacagctgggcctgtgagaaggccagaaaccctggcaaaggtgttgaccctggctgcagggctggcggggctagggtgggcagccagagtggcttgctctcctggttgttttggagtttgcgcccgctccagtgtctagctctctttgcatttccagactccttctcaccaagagcacccctctgtccgataggattattcagggttcttctcgaagtgaacagcgttattgcaagcactagaattgaggggatagagggaagatatgctttgttgttgttgttggttttgttgttgttgttggttttgttgttggtggtggttttgttgttggtggtggttttgttgttgttggtggttttgttgttggtggtggtggttttgttgttgttgttgttgttgttgttgagatggagtctcactctgtcgcccaggctggagtgcagtggcgcgatctcggctcactgcaacctccacctcctgggttcaagcaattctcctgcctcagcctcccgagtagctgggactacaggtgtgtgccaccatgcccagctaatttttttgtatttttagtagagatggggtttcaccatgttagccaggaggtctcgatctcctgacctcgtgatccgcccacctcgggctccccaagtgctgggattacaggtgtgagctactgcacccagcattttttttttaatgtaataaatttcccacagagagggaaggaggatagggtatgtttgttttgtgtttttaaaattgtttgctctctgcatttccccaaagacatccaggctgtgcctttaccgtcagcttgtttctttggtcagtgtctgccactgtgttcctgacctacagacttgaaaggcttgtgcagttgtcctggccttcagtatctgaggggcactggttccaggatttccctccaatattaaaatctgcagatgctcaaaccccttacctaaaatcggaaattatttgtagaaaatctatgcatatccttctgtatacttttagtcaactatagattacttataatggctaatacaatgcaaatgctatataaatttttactgtattgttttggatttttttgttggttttgtttttgaatagtttcgatccccagttggttgaatctatgcatttggaacccgtggataaggagggccagtcatatagggcaaatgtgggactggcttctctctaaagagagggataaagtacacctcagatgcgcagatacagtctggctgcagttacactgggataggtatattccggactttccctgaagttgtcaacttctgactcagtcacattcttgacctctgagcatgtagctatcactttcacttgcatattagccttagtcctcttactcatttgtctgtcagatttagttgttctctgtggaggttaggaacacacaccgactacaggcactgagtgtcaggattgtcaggatggactagactatgctgtggaaacaaatacaccctgagatcctagtggcttcatgcgataaagtgaattactagtctccttattgcctggagtaggttgcacagacccacagaatgtctctccactgactggagactcctgtgtctgaattccttccctcgtgtggcaccagcaccttggagtcatgggattcagctacagaggggagagagagaggctagaaggctgagcagtggggtagcaggaaagattgagcaagatgtttcatgtccaggcctaggactggcctttctcttcatcttccattgtcatgtagtcattcacatgccgttgggctcacggtaagggaaattggagaaagaggtctgccatcctgtgtgcccagaatttggtgggcaggtggtcagtctgttctacattttagcagtctacccaattattgaagtcttagtgcctgggcttgaagggatctttggaagcaattttgtaattcttttatctgcacctaaaaccttagactagtgcttctcaaaatgtggtcctgggacttggcagtgagcatcacttgggaactagttagaaatgcacatactcgggccccatttctgacccattgtacgagaaattcttggggttgagtcaagggatccacttcaagcagccctctgatgctccctaaactttgagagccactgtcctagaccggcagttctcactccactgtgactacccactgggattgcctggggagctttggaatgttctgatagctgggtccatagccacagattcagaccgaattggccgggggtgtggcctgagctgaagatgagaagcattgccctagaatgattattgaggaatagcttttatcctgaagttctctgtgaaaatagatttcatatggctccattggcacttactaatcactcaaaggccatgggagcaattgattttcatgtcctaagcccttcccttccctttcaattggaagcaacctcccagctttgcataaagtacagacaaaatagagatttgggaacttagacatggaatcctgattctgtcactgactcatcacgtggccctgagtaagccaattaatttctctgtgtcgtgtgtctgtaaaacgggagtagtaacacttgcccacagatgttgccagcattatctaattaatgagcacagagtgtttgggaaatacaaagtactgtacaaatgctaatcattatgatgaatgcggtgcattttgcagatataaaagtgctgtgtatatgctcataattattataattattgctaataccgataatattcctactgctaatgtatttccctggcagtaagagcttagtgtattctttgggttaacatcttgccccgcatgatcaggaagtcttgctaagcagctgttaaatgcccctggctttccacctttcagaaaagtatcattcatcaggagtacaaatagtcacgtatgtaaaccatcctggggtccacttatatgagacatccctggctgtcaggtcactgccagatcatgttcaagaagctctttttaggttccagaggtacccagaatgtagagtcatctgctttttcttgtattttcatcagaggtattttttttccttctactggttttttatctacaatagctttgtcatctgctttcatatggtgctaaatgtgctgaagaaaattctagtgtgtgttggtgagtgttactaggttccaatgctgacaattcacagatattatctgcagcaattggtgttgagaacaagacaattatttttgctgtggttttgtttgttcagttttaacttgggttttgattggaggagaagtgttggggaaaggcaattgtttctctcttctcactttgcaagaagggaacggtattgaggattgtgggactggtttgaacaaagcaggcaggctagaaataaagagagcaaatagatgactttaggatgcagtcagcagttacaagaccattgtttctatcctcatgttccttctgtccttccgacacccatttcctggttattagatgtggacctctgtattttgtagaccttgtctacgctactgcttcctgaattattcatagcaaattgggcatgaaacttacaaaagaaactcatcctgagaattatcccaatttagtacaaggcttgaaaaacaaacaaaaagcagagtttactgactgtccataccatagatccctgatggtccaactcttgtctccatttcaaaagccctgatgatccttttccttttccccttttgtggccccacatgatatatgaaatttcaagtttctttgccttgggctggaactacaacaactgatgaatttgtgctgattgtcttatgctgatctgaatctctgattgatagaggaatccctgataaataaaaatggggaaataacgatcaatttatgtagatcagaatttcttaacgatatcattttcattttctctgaagaacatattttaacatttattgcaaggcaagtatcctggcaacaaattccctcaacttttgattgtctgagaaagtcttaatttctctttcacctttgacgaataattttgctggatacagaattctagattggtggttctttagttttaatactttaaatatttcactcgacgctcctcttcctgtatgcatggtttctgaagagaagtccaatgtaattcttatccttgcttctctattggtaagccctcttccccgaccctcagtttctcaagtttgcctgtctttgattttctgcagtttgaataagatatgcctaggtgtagttttttggtattttgattagtgttctctgagcatcctgaaactgttgtttggtttctgtcataaatttttggaaattctcagtcattattgcttcaaacattttttctgcttctttctcccatctacgtctagtaatcccattgcatgtatattacacttccttttgtagttggatattctgttccatttttttcagtttttctcttcaaatttcaggtttggaagattctattgatattcttcaggttcactggtttttccttggccatatccagtctattgatccatggcattcttcatttctgttgatttttttttttatttctaccatcttcttttgaattcttttttacagttttcattttctgcttacattccccatttgtccttgcaagttgtctgctttttccattagaactcttagcatattattcatagttactttaaatcctcaatctgataattccaacatctctgcgatatctgagcctgttctgatgcttactctgtttcttccagctggttttttttttttttttcgtcttatagtatgctggtggtacttttatctttaaagccagacatgatatactggggtaaaagaaactggagtaaatagatttttagtttaaagttttatgtttctggctagggatcaagctgtaattattgcttgttgtaactgtgtcagaggttaaagtttcctctggtgttcttgtttttgatttccctgttgtccctagaaatttattttcaaataccatctgagatacagaattctttcatttccattcccctcttgttatgatgagctactcctatggatgtgaccatgggtgtggggggagggaaatcttctatagagccatgagtaggcctcagtattttactaagcctgtgcccctgcgccgtgagcttcacaagtgtgtctcagggttgcttttcttcccccgctcaggtgagacaggaagtgtagaaggggctgcagttgggtattttcccttccctgcatcattaggctctggtaatataatttctattgagggcaggccttcataagaacaggatgcatgtgtcatatttcaaaatggctgcctttgctctccccctgctggatgcatgaggggatttttctttgatccttactgtgagaacctcctagggctcttgaacctcctagggctcctattgaagtgtggagtctcccaaagtctggagctctcatgttttgacccctaagacttgtgcacactgaacctccagcaactcatcagttccattttagtttttctatcctgatactggctcccgtagagggttgtatggttggttggtgtgggtttttttttttgttttgttttgtttttttgctactgggcttctgctcttataagttgtgattctctgtatccacctgtcttttccaatttaggggcagtgttttgctctgtgacatctctgaggatctcttttttttatttttattctttaagttttagggtacatgtgcacaatgtgcaggttagttacatatgtatacatgtgccatgttggtgtgctgcacccagtaactcgtcatttaacattagttatatctcctaaagctatccctcccccctccccccaccccacaacaggccccggtgtgtgatgttccccttcctgtgtccatgtgttctcattgttcagttcccacctatgagtgagaacatgcggtgtttggttttttgtccttgcgatagtttgctgagaatgatggtttccagcttcatccaagagttgttgactttcggtttggtcagctttttccttttcatgtgaaaagcatgatgatgatgactccagcctgtttaggtgctttaatggaagctggaaggtgtttgctccaataattatcacttaacaaattcagtccacatagtccatcagtcaaaaaataatcatatgggcctttagttgtgaaaaagtgggaaatagagtgaacatcggcttatagttactactatttgttcttattaatggacttttttgaaggaaaaataagaaaagcatataagggagggagtggaggaggtagtcagagacgaggagtgggtataaagtcatttctgcctgttattcatgaggaaagaattatcaggaccttcattaccagtcctcgtgtttacatagggcaggcttatttaggaggcatcagcagtgttccacatgaatgaatttgtcatataactaagctatcatcctttaaatggaacttaaaacattgcaatcctttttgatagagttctttttctaaaatatattattgttttgtcttattgagcaaaacatggagattatcatttgtcttattttgttactcaggtcattattgaaaacatcagtcacagagtgactctgttgtaatgtggagtaggtaactgaggccatctacacctaaacacactccctgtctggcttcataatgcctagcttagttacccctctcctcaaacactcctaaaacccctaccccacctactccacctaaaataaaattaaatttattaattactattttatttgtgtctaagctagtccaattatctcctaaaatcatctcgtatatcactttgtgatatacatacaacaattaggaaacccaaaccaaaacactgtgctgtaggatagggagaatggagcctattatttaattactcaccagactttatgcatgaaaatcgttttctggcctataggctaaaaagtaaatacatgcataatatgtcatttgtactgtggtgtactatggagaaaaataaaccatggccaggggcttaaatgggactagagatagaggtggtcttggaagccctctttgttaagataatatttaagtagagatctgaaggaagtgaagagggaagccatttggatattgtggagttggaagagggaacctcatatgccaaagccctgtggcaggagtatgctttggatcaggaaacttaagaagaagatatgattctgagaaagggaacaaaagcaggagtgagagtgagaaagggagaagaagcaggagatgagagcagagagatagtgggaagctagatcactgaattagtcagctagtgccacaatagtgctgcataaaactcatgggcttacaaaatagcattttttctcactttggacttgtaggttcgctgggaggactatagactgaaaattgggctcaggcttcttccacatatgttcattctggggcccagactgaggagccagcagctactcacccagacctggttgatggaacaccagggcgcaaaatgacaagctagccactcatgcacattgcaagcctcaatcctgtctacaaacatcgtgcaggccaaagcaaggcacagagccaagctccaaacacagtggtgggaaagtataccctgccaacagtaggaggggaaaagatatgtgaccagttattcaatctaccacacaaaccagaaagagtgtggtttttgacttttactcttagtgtgaacatctttaacttttactctttttgtaaagggaagtcattaagtcatattgatctgacaagtgacttgttcttttattttcaaagagtaactctgggaccatgagaatagactccaagggtcaagttggaggcaagaagaccagtaaggagactgttgccgtattccagatgagaggggatagtggctttgaccatggtgtaggagtggggatggtatgaaatagtcatcttctggatttgtttttcaggtagagtttcgagaattggttggtagattgggtgttggtatgagataaagagatgggtcaaggaggtcttcaaggtttttgggtggaatgatgagtagggaagactggatgaagttcaagtttgaaggttgagggcagggaatctggagttctactttcatcattaaggcttgagatacctcttaggctttgcgtacagataccaagtagtcagttgtatacatgaatctagtgctcaggacagaggtgcaggctggagacagggttgaatgaaaattgataatagacttagacatgtcttggatgttgaaaataatattttactcagtgagagagcatgatttatataatctcttatgtgtgaaagtctttaaatcttcttgttctcatctagtttttccctccaaaatgacatgctcaaaggccctcccactcattaatctttctccttctctatctctgtgtttcatttttaattggcatttttgaagactagtctttctttatttttattaatttattgatcaactgaagtctgtattatgactgctgaggttattaaaactgttctgaccaaagttctcacactctgcacacatcccaagtggactctatgctgctgactccaccactccatccctccgccactgaccatgcatccactactgtgttcaagccattccaccgcctgtctcttctgaagccctctcccactttggcttctgcaactctgctctcctggtcttgttttcttcctgctgttctgtgatgctctggctttgtctccttgtgcatgctttctctcctgtgctaaccccttatatgttggttctgtccttgacttgaagctcttagcccactctgtgggaagtctcatccattccttggattttcactgctgtttgggtataggagctgcacacttcattgtctctgaccctggcccctcccttgaatgtagtgaaagtatttccaactacatgtaggatatatccaagtcaatgttcagtgatacctcaatttcaacatatccaaaatgaaacatcctctggtgattggggaggtaagagccatcgctcttcctctgtgtcttagtgactaggaccttcttgtaggtgtcatactcaccaatccctactccaacatctgttcagctctgaattgtcttataatgctctagagtgggaagtcctccaagtcaccccttcaagttttcatttactcatactttaagatatctgattcaatcggtatctcctctaagaaggctcctctgggtttgtaactaggatacagcattcttccttggtattctgccaacattttattcacatctcatcatattatgttgatgttatgtgtatatatttttccctaacatcctaagttaaacttctccagggaagaatgctgtatttatcatctcaagtacctagatcagtgtctaacatttagtaggattttagtaaacatttttgagcttgacagaaaggattaatttggattaatgaacccaaccaaaggtaagtaaaggctcagatacagccatatatgcctggtcttctaaacctcatagctttacctctgggattcatagtaatgttgatccatgcaaaagctttttctttgtgcccactatacacagataatgagagcacgctcatggctgcgggcaagtagcactgcatgattgacatgagttctgacaactcctccgaaagagaaagtagcccaatcatccccagctagatgatgagtgtgtctcatgttattttcaggcaatgtaaggttttatttttgtcatgcaccaaatggacttggtgtcaggccgtcaaatgtctggcaatctgcctagctgaagagataacatgagtggtgaatagaacattattgtgtgataatgatttccagcagctattgaagataaattccaatgcaaagtagaaagctttatttccaggggaggagatattgatcctgtggccactgtaaatagaatgagaattgcaggtgtagacagaagtccagtcttgtcacaaacattgagatctgactagcagaaggaactgcctcctgaaggcaaatgaaagcccacctgtttaggaattgctcgttgctccccctaatgctgtcactttcctgtaggaatgtaccatgtgaaccagatgcagcgtgagaagcatattaccaacacaattcttaaatgaaaaatcaaagacctctgcagatcagccataattggctgtggtatggtccctgggatctcgcttggttctttaagaaaaatgtttttatgagtcagagataaatccggagactggattacgggatttgttttatagacttaatggttgattgaaaaagaatctcatattctttatatacaatttgagattgatgatgtggttagtcttcattaggttttgacaaactggtcattacaacctgtctacttcatagaatattcagttttagaaagaccttaaagatcatctcatctaattcttttatttttcatgaaggagacagtgaccttaagatggtcttatagttaacttggacacttttttgaggcattatcaaaatacatgactttcttaaaccttactaggattgtgcattaatgcaaagctgttttctttgggatagcacttatttcagaatgagaaaaatcttcccagagaccttgcaaatgcttcaaggtctgggaattctaactctctcttgtttcacaggctagtgcacatagtttatattccttctgtggataaatgtagactatctggtgctctcatctctttcctgcctgcccagagatcacctgctagtaggcactacccgtcctggattgcctcaccacgatttgcttcacccgtctcaggggtgtcctgaacttcagtgtgacaaacttcaggatgtatgttaagtgcatctgtgcacctcttagtgaaggacatttgcaggatgttggagatctgtggctggaagattagcaggtcagaagctagctcaagtgggcaactggatagtggcagatgggtttacattcaatccagatgaaatcccagagggcatttgggttaaccctcagcaatggctggatggtaactctgtcgtgtttctccacctttgacacctagttttgccatcagatggttgtgagtttagggacaaaggaacctggagagaggagtagactttctttttctctcctcagagtctcagagaaatgacctccctgctcctgcaatggactatgccccactttaactgtgccgaggctggatgctttgccaaaggctttccttgtttgttccattgatgaccacagttctccagatcttgacctagttgctaaatccctgtgctgatcaaaaatgttcccactactgagggcagatgatatacattcatgatacaagcacataaactccagagggatagtgccaataggagcatatttctggtctcctagcatcttgattattcagttttaaacttgtttatgctcatatttctgatgtttttcttcccatggttttcattaacaaaaaataatctgttttgctgttgtttgctttgagtaactgagaggactgtggactgagagaaatttaaaatgttcctttctaaaaaaccgtacatgaacttgatattcaggctctcctagatgttcattttaatctataagaagctgtgtttatgattctgtcataccagagtgagtcccctcttttctctacttccatagctcttgttgtctgtaccagtcattggcaattaattatatactgccttgtggcatgataatttcagtttgtgtgtctttatatcattgatgtaagtggactcggatccttgagggagagaattgagtgtcatgcttctttgtttcctctctaacaccgagcagaatgctatatgcatagtcggctgtcaaacaatatttgctgaatgatccaccacacagaatttcttaatgcctctgcataatggtcccagagataatgttgcataaaaagagacaatattcttcccagtattaaaatattcggtgaaatgccacaatagtgatgtttcaaaggtctgcagattaaatgtttcagggaatgtaaattggctattgggctattggcatgtgtgtgtgtggcagtgggaggggtgtgtgtgtgtgtatgtgtgtgtgcccatgtacatgtgtaatgttcctgtgtgcgtgagccccattgctttcatcttgaattttggagccctctgtcagtccctctgattgaggaaggaggatgctggctgggtaatggatgtcttgctctagctggcaaggcagtaatgcttcaactggaaaatcattaaatcccagatttcagcctgtctctctgccacctctcatcagcagcaaatctgctttaacagctaagaattcccttatctctccgtgagtgtggaccatgtgctgctgctctctgtagatgggagatagagctgcatcattacgcgggggtgacaaggatgtaatttacaggctcaatcagttctagttaccatgtaattacagagttattacatggtcatttgttcctgatggacaccagtgatctcttatcctgttctactgtggtctgtttcttgtcttatgctactaaggatatttagtttcttctgcatggcgtgttaaatggtgtactagggaggaaggacagaaacgagttgggataagatgttgattatgctgtgatgctatttgttctcctcaattggcctggtgataataacagcatgctgtggctttcctcccctaggctccaagttcacattttcttcataagagagactggagacaatattgtacttggcagcatgggggaaattgggtgtaaggaatattctgacccattccactcagcgaggagatgacaatatcaaccccaagattatgtcactgcctcttgtaatttgaagctcatgttaatgcagtggctgttggagaaaaattcctttttataatgaaaaaggagagggaaccatttaagtgtgtaattcagtatcagggagaaatgatgagaaggttcagtaacctgcccaatgtcaccaagcgaatggtgtatctgggacacaaatgacagagcttggccccctccactctaactcatttcagtgaattcctgtcattaggaggcaacacacttttaatagcacaagtactggaaaccatgtggagaaatctgaatattccctcatatttgcttgaatgacctgggataagctcctttcttaactccttgtttttattaattaagaattgatgtgtgtgataccatgacacattctgaagatgtctaacataggtggattcctaatccttgggaaatggactgaagggccatgtgtcttgctattagaaagtgtggcatccatatggtgctgtgggtggtatcctggggtcagcactgaatgcacgtcaggagacctgagtcctgtctcagtgtttccactgagttgtgtgattcacagtctgctactctgcctgcttaggagtcagtttccttctccagatgctatagtttggatgtttgatctctgcaaacctctgctgaagtttgatccctgatgttggaggtagggcctaatagaaggtgtttggaccaccgggatggatccctcatgaatagattaatgcttcctcttggggggtgagtgagctcttgctctgttagttgctatgagatctgcttgtggaaaagagcctggtaagagagagggggagcccttctctctcttgcttcctctctcccctgtgatttctgcacatgccggctcccttcacctcagccatgaggggaagcagcctgaggccctcactgccacgcttcttgtgctgcctgcagtaccatgagccaaataaaccttttttcattataatccatcttgggtattcttttatagcaacactaaatggactgagacactggacaatagtcaaataggccagacaattgctgaagtcctctccagctgaccatcgtctgtgactccatgatttaagttgacctgcgagaagagtcagaaagcactgtggtatcattaaggctgaaaaacagaggtcatgggatgaggatattcagtgttgttatcagagaagcttcttcccactgggagccagaaaggtgcttgcatgccctctctgcatttcagttgatggaatgctgtgagtcattaacacgctctcctacttccctccaatgaaaacaccttgctgatttaattaaaatacatttttttcttcttttggatgtctttgaaaatggcactaattataacatagctgctatgtaactaatatgtgcaggtaatattgtgattatatatagacagccatatgctactatgcagccagtctcattgctgttaaactgctgaagcagataactccatgtccgtgcacacaaagtaattgcaccaaactaatttgtgtttgcaaacagatcctaaattaactatgtaaataggcagatctgcaaacaaaatattagaccgtgcatgtgtgcacacacatggggcagagaggaagtggtttttcacctgcttgaaagatgtcacaggactggggcttgcctgtggcatgtgttgccttgtgggcctcttggtcccacctagctcctgtcttgcattagtaagtctgagttattctgttccgacacaggtgactgaaggcaacctgaatttgttttctctaggggtaaagggttatcttgatcaatccacctttcttgatggtgctcgctgccctcatgcattctttgaccaaagatatttccaagacagctggccccggctgtgtgttgtatgtggagtggagatgttcttaatgcagagaagttcacgggtgtgattgaggacagtttggttcctcggcttgcaattgttagtgcccggaggagtgtgtgatcctttgagtctagcagggctgtttgaaatctggttccaccttgggcaagtcacatatcctttctaaggctcagtttccctgactgtaaagagggggtgagattggagtttcctcctggggctgtttagaggattaagtgagcaagtgtgcgtgtgtagcgtttagcacattggatccgtgttcagtcaacccttgctgctgttgctgcacttactgatgttgtcacccctggcagaccagcacgcttccctgtgggccctggcaacagtgtgctgactgcttgcatggatattccaggtgaggaggtcagcctcaaagaagaaagcccactttaatcaggcaagttgggccccaaaggacgtctcgcctgtctgccttcctcacgtccctgtgtccctccgtccctcctgcactcagcgtctccctctccttcagcgtggagcctgtggtctccacctccacaatgctctacttagacctctgctcttccatttcccaacatgcttcttgtgttgtaaaccttactctccccaggcttattctctcaagtcttgctccgtgtctgagtggttatttgagtgagggcaccagtcgggtacagcagccacactggtgtccatggggtgtttgtgccaggtaatccctctgtccagaacactctgcccagggagatgggtgaggcccggccctttgggctttgaggtctgtgctccaaccttgccttctccagcagcactgcctcccacccaattggaccgcagttggccccactcccactctccattcttcttaccctgtcctatttttcctttgtttcatagccaacctcaccttctaatattttgtgcgcttgacttatgtattgcttactgcctgttactccctgcttgcttgtaagttccttgaaagcagggccttttgttcattaatgtttgtcaaagatctcagcctgagtctgtgctaggaaggcccctcataattttttttttttttttttttttagaaagacagggtcttacaatgatgctcaggctggccttaaactcttaggctcaagcgattgctgtaattgtgaatctgtttcctgtctggattcttttgctttcactctcagaagccaacagacttcaatgggaaggacctgagggccaggaagaggagtggagaaaccttcgcagaggtggtcagaggacaagcaattcagggaccagatgaggctgggaacttaatgggcagagaggcccaaagggggcctgaactggaggaaacagaggcaggcaccaaggcaggtgtgtgggaataagacagcagcaggaatgtgcgagtcaactccatgctcatattgcagatgtaaccaagtgacttactttctctctctgcggcgcagtttccgcaccagtaaatcaccatgaaatctaccatattcacctcatcgagaatttgtgagcgtcaactaagataaccacctgaaagtcattcccaaagcagatattacttttttttttggagacagagtctcgctctgtcacccaggctggagtgcagtggcgtgatcttggctcactgcagcctctgcctcccaggttcaagcaattatcctgcctcagcctccctctggagtagctgggactacagatgcatgctaccacgtccagctaattttttgtgtttttattagagacgagatgggggtttcaccatgttgccccggctggtctcgaactctgagctcaggcagagttctgcctcccaaagtagtaggattccacccgcctctgcctcccaaagtagtaggattacagacgtgagccactttaaatattatagttgcttattattatttctgtttgtatctcagtttactagtctgggaaatgggccctagcaagaatggccattaactagaatggaggtaaagtgggaagtatgatggatatttctgaaggattctaagacaccattgaaagctgcatgcaccaagaaatggggcagtttgggtgacacatttcaggagaagagctttcactttcctcagcacacctgaaggcatttcttatttcattaacctaagattaggaacagccccatgacaaaaaatgttggcaatattgatatgaacaaataattaatcccaggtgctacctgctttctcccaggtccccctgtgatccttctccttatgctaaggggtcttgttcccactcccatccccaggcttagggagttgtggacaggacagtctattataacacttatagccattaaaatgtgagaacaaagcccgctctgctctcctgttttttaacctctttgctgaagcataacttctgtcaataggtgacctaattaacctgttcaagtcttgaggatttttatctgtgcatgttctttgatttcagattaggattctcaacatcagttcaccactagctagctatgtgaccatgaacaagttgcctgacactcaatgtccttattggtttaaaaaagggggtcatagctagctccacggtgttatgaagattaaattagttaatatttgcagaagtacctaagacaattcctggcatccagtagatgtccagtaaattttagttttgtcctttgttcctaaaataagcatgctggagtcttcaataccccacatttaaaaagaactgttgcagttacatttttctggattggaagctttctttgtgtgaaatacacgtatcacctgtacctttttgttatttttgctctgcctttttgtttgtgtgtgggtgtgtgtgtgtgagagagagagagagatagatagagagagagagagagagagagagagaaagtgagaagtggtttgttttggggatatcatttttgttcctttttgttgttgttttttaaatttgtaagcaaggtgatggaaaaaaccagaggagaagccaagtgtatctgaagacaagaatgtggaagtgaagaatgtttatgagactcactctaacatgctgatagcaaaggacttttgttcatcagattccctcacatgtattcagaattaaccttaagcacatttagtcagtcatacattttatttttgtctctgggcattaatgtgctgacttgtgggattattaaactataattccccaagatatatttctgtctctcagtgggtatgaacgtgcaatcattagcaaatccaatatttaggagtctttcttctctctccacggtaaatgggagcagaggaaggatcatggctgatgacagcatctgggtcagacagcccccagtactgctgagttgctgggcagtcctgaatgatagtggaatgactgtggcctttggaagcataagacatgaggcttgcttctggctctcacgtttactagcagtgtgactttcagcaagtcactgacccacactgaggcttagtttcctcataggtaaaatggggagaatacctgtcatattgagaaggtcaaataagtgtcatgtattagtatattaatgagctgtgaaacaatgactattgttatatgttgttagtggtgttgagttatcacttagatttccaacctgaggattgagtaccaggattgtaagctaattatcctgaaggcctggcattctattgaacttgttaaatttatgactgtgtattgttttaaatgagtaagcagtaggttgccacaatgtaatctcccttttatacttcaaattgcaggtgcatgtctacacgttttcctctagacccaaaatgaggaatgcatttgggtcagaatctagaggaggtgttttgctttgatcatagatgccaaatagcagcccctcgttcctgttctgtgagagctgtgccccatgtatcagtagaagaatggccccatttctagagcagctatggctactgggactggaaatgcccaagggatgtttatacttcctgctggtcaatcagatctttgtatgggctccagatgtgttgctgaagaggaaaaatttgaccaaacaaaaacaaaacaaaaagctgatgtgagcccaaccttttcaatgtcccagatgctgggattttccacagcatcactcttttcaatgagtgcctttaatgctatgctgaaatctccctggacacctccagtgaaaaggctctcgctgttgggcactgccattgtctgcctccaagaagacaaagagcctttgagcttagagctgggaacacaaaattgggtatgagatgggtcctgccatcagaagctcgcagacatcatggtcagaaatacctgttcacaatgttctgtcacagtcaagtattgtacagaccatataaggcagggtagaatagataggatacacaaagctagattacttttttaattaaacaattatttatgcaacatctgctatgacattgtatataatgtctgccatccccattacatcaaatctccataaagacagtatctcttgttcatcttatatccctggtttgtaggactctatctggtatatagttggtgcacaaaataaatattttagagccatatttcattttctgagcttattactgttgatttatgcctctgttacataagtggaagtatgaagaggccttgattaaagtggaatacattgtagaggcaggggcagttcttatgatgctgtagcataaaattgcaattgaggaatcctattccatcattctaatggccaagggatgggtagaagacattgctttttggtcgtagctgaggaatcctaggtttagtctcacattcttgctactgcttagctttggttagtctttctgcaagctcctacatggtcactaaggacctgagcttggttttaagatttgacctaattcttcatccttcaagcaatatgtgttctggttaatgagtttgtcagaagcaaaatgaacaattctaaccacctgtcccttaacaaaggccactttaacaaatgtgagccatgtgcatttcagctaagatgagggagggtgctttcagccaactgtcaagagctcatcaagccccttcctgcatcctctgtcactgtacaattattgaagtccagggagtagcaaagcaagagacctgggtgcacgttggccccacatggagccacagactctgactcagccagtttttacagattgttgatttgggttcagttatagtttctgcaagattggaaagtggtcacccgttatggctcttggccactgcttctgggtcatctcaagcacattattcaagtattctcttcagaatgagctggcagacgcaaacaagccacagcatcaggcttcatgggaagtctggggacttaccattgtcgagtagtatcaggtggtgtctggaggggagaggagagaggtaagattgaaaattcaaagaatacagagttttggtggtatgaaatatatcatctggaaaatgtcactttgtcctgagaaccattctcctggttaaagaaggcccaatcttgggataaatggcattactgccatctcagcattttaagaagacagacaccaactatgtgtgtgtgtgtgtgtgtgtgtgtgtgtgtgtgtatgggtatgtgtatgtgtgtgtatatatgtgtgtatgtgtgtatatgtgtatgggtatgtgtgtatgtgtgtgtatgtgtatgtgtttgtgtgtatgtgtgtatgtatatgtgtgtatgtgtatgtgtgtgtatatatgtgtgtgtgtatgtgcgtgtgtgtgtgtgtgtgcttatgtgcatgtgtatgtgtgtgtgttatcatttaaatgggtcttatgcactacctaccacaaggtcattctataacttgtggcacttcagtctcaataacctctgccaataacagggctcaagtgataataagtttgcctgtgtgactctttctttcatgcaaatataaggcatttgtatgttacggcttaccttttccctgcaatacctggaaatcagagtcagtgagacactgtgtgttttagagttgggaaatctgaggccaaaaagaaaaataaattgtagaattcagtagatgtgtctgttcaagaggaggacccctcttctgaatttcctcatccagtagcacctctttgtggatcttctcatgagtccatatattttcttatttccatgttcctgaggtggccgacaactgagggaagcaacaagctgccccattgctatcatgggtgtgataggaacgagcctccacattgggaccttcgccagtgcatgtcctctagtgacattttatccctgagctcccagtgcttttcccgagcacaactccatgggacactgcctagtggaagagaccacagcgggatgaaggaagaactagaaaatctagacgaaatggataaattcctggacacaggcaccctcccgagactgaaccaggaagaaattgaatccttgaatagaccaataacgagttctgaaattgagacagaaataaatagcctaccgaccaaaaaaagcctagcaccagacagattcacagctgatttccagaggtacaaagaagagatagtaccattcctattgaaaatattccaaaaaattgaaaagaaggggacttctccctaactcattatatgaggccagcattagcctgataccaaaatctggtagagatacaacaaaaaaagaaaatgtcaggccaatatccttgatgaacatcaatgcaaaaatcctcagtaacagcgttagtgtttcatatcaggctgtctgttgcgttctgtttattattgggatacagtgcttttgtgataagcagttacacatctctttgtacttgttaaagggttaagtgctggcagttctgggaggcaactgccatttaaaggaagtagaataaaagatgatgttgagaaggaagtgaaatggagaaggaagaggtcagaggaatgagggggagaagctgggagtaaaggagcctgcccttacaaatgtattggtaattaggctgtgctctttaaaaattaataacatttttcccattgattattctacatgtagagatatctgaagttattatttttgtgtattcccttatattcggcttcttttacaaacatactagtatggtcttccatgcaagtatttatttttcagacacaatatgaatggcaatttaatattctagttcatgattcatccaccattttcttaggtttaatccaaccagaaaggtacgggatatacttagctcccaaatatgagtacagctagatcagagacagggtttcctcaaagcacgtttctcagcatcagtcaatagcagcggggttgaggttttcctttctggactcttcctttttcccacggcacagcacgtgggacatggcagccatatatgtcggtgttcctggctgactttcttagagaccctggaactggtgacccttttctctgagctctttctgagcttcttccatctctggaaatctgtccgaggatctggagcagtgttgttttggatgggaaagtaaacaatgagtgaatactgctattctcgttctgcataggttgtgtgtaaaaatagagttgcttatataaagactccaaaatggaattttatctgtgcatttctgtgtcatcccttccccttttagactataaccatccaaactgtatgacctcgagtgagttactcaacatattcaagcctcaatttctgcaaaatggggataataatagtgcttacttcctaggatggtaatgaggattaaataagataagtaaagtaatatgcgtgaagtgctcagcacagactggaccagtgtgtgcacagctaatgctgacagttcatgctattttgtcattattgctatcatcctgagctcttccacaagacaaaccatattgtatttattttttgttgaaggcattcaatagatatttgttaaattgaactaactgttttaagtaaaaataaataagaaaaaggaaaagaaaaaaaaaaacccacccctttacataacaacacagcaattctactggccaatggggaaatcatacatctttactgctgtgagttattatactctctgaataaacataagcctttcatatgacctaatgattaatggcttatgcaaagaaattttaatgccattaataaaaaattaagcagcaagcttcccccacttttttgacagtgtcaggctttcacctgttctcctggggacaacaggtttccgggaacatgctgagtacagataatagatcattcccaggcgacactcccctgtgtgcctcatgtcttcctgggcagcatgtaggatggatacaaggcactctttagagaaaggcaaggggtctttgtggtgaggaacagagatcacagctgagcactggctttatctatctatctgtctgtctatctatctaactatctatctactgtttatctatctaccatatatctatcatctatttataaatcatcaatctatctgttatctatctatcacctggttattctctcatattgagtatttattctgtgtcaggaattacattaagatcttattcagtcctcatagcagccctaggaatttcaaagttaatctccgttttacccatggaaccctgggctcagagatcatttcctgttcatggtcatatggtgactgaaacacagatctgggattggaatgtaggtctgtctatttcccaagtgtttccttatccttctttgcctccatccagtcttctgtgcccccatgggctgggatctgacataggtatcattcattctaagaagaatgagcaggattctgacactgaatgctccagaagggaagtttatccttttaactaaatactctttcagtgttgaggtcaaatttcacacaaagtctccaggccagcctgatgctgaattctgaatatcccttatgaatattttgtcctattaactaaatagtctttcagtgttgaggtcaaatttcaagcaaaggctccaggccagcctgatgctgactcctgagtatctctcttgaatacattgtctctaagcctttggtcagctgtgcttccaattcaaatgccagttttcttcaaaggattgatctcagcacctcttatttattttgaagcaaaagctccacattttcaaaactgggattcctggtctgcgaggcaggggagtcagctagagcctggtcatcactggcattctgagcagatagcagcctcctagccatagctctgttcttgacccggtggccaggcagggcagtttgcaagctcagctacagacacatgccctccacaggcctccttcctcttaggccccactgtttttccacataacttttctgagtctgagagaagaaaactggttttctctaaatcaagagtagggtcctcatttaggaaagccagaattttctgtcttacgtatcatattacatccttgacctgtgtgagacctcctgttgaggtcaaagttgggtggacgacccgcttgacatctcagtgtggagctggattgcccttcaatccctaatgccctcactttctacccaacttagcatttcacttgtaattagttcctattaacttttttttttttatatagctgagtatgtctgcgtgtgtacatgggctcatgcttgcatgcctgctctgcttagctatgtttaaactgttagaaagaagagaccattccttttttatgtgtcttttggatgagctcaaaatctaggggtatatagaagaacttcagatcacactgctgcctgaccaatccctggggatcctctctgctgccaaatgtgaaggaacgcattgttagacagcaataccccccatgccgccacctcctccctcccttcagcggcaaagcagagcccaagagcctcctgcaaagagagaaaacagattatattttgtagtttgtaaagatctctgggtccacacgatcaatacatttctggtccctgtgtggggaattgttaagtcattctttagcaccaagaatagaggggccagtacttcctggggactaacaggacaaccatgacagccactgaagcttttcttgtgttcacctctggaaacaggaaaagaacagattcttctcacccttcagagtgcaaagggttctgcatttcttgtcataattccggagtctatctgaagccttgtgtgagaaagtagtgtgaacacggttgatgtttgtgtcaagatacaaccacagtggctcagggacccagaagttgagaatcccagcacaggtcagcctggtctcagcattctcattctgacatcctcaaaacagacagacacccccaaccaaaacccagcaatatcgacaacaagaacacaaaactaacaaaaacaccagaactacagagctgtttttcttttcttttttctttttttttttttttttttatagcagctattacatgaaaaccgtgtactctttccttctgcacctatttgtgcacggtgctggatcggggcttctgaagagtcggcccttaccctgtaggagattcaaggctgactgacctgagagagaaggacttctgcattgctgctcaggatttttgtttttatttttctgttaattatgagcccagaaaaagggaatttcgatttttcagatatgaccaggtcataggaaatgcaattgaagggaaatataattggagggagatgtagcctcctgactttgaggccacacacctcacatacctgaggacaagaaacaaaagaggaaatcagacacatctgacaaaagtgagacggatagagcataaagtatgtctgaaaacagcaacaacaagaacacttcctccaagtgacccctggaggaagacacccccaggcggcccaggcatggagactgtgagactcacatctacagggcacacttcctaggagaaaggcaagggcacattcccccttcatgctatggggctggccgcacctgaggagggagccacaccctttcatccatgccagtctcctccctggaagagaggctaggctggggcaggggtgcggttgtgaggctgaagagcagccaggaggaaacccttctagtgagcagaggatcagctcctccaacacacactggctctggggtctcttgcaggggttgtcagtgagaggtgagcgcccttggctgtgagctgggagttatcagcatggctggagatgagatacacattgctccatcaccctcacctgggaccaggttttgcctatctcaatggcagcgtgactggtgggatgtgacacctctggggaagaggaccaatgctgtgttcagccatgggtgcagggtgggaaaacctgatgggggaaaagacaaagcaaggagggacatttcagtctagctcagtcatgaggatggccaccaaggtttttgccggtcagacatgtctctgatttgatggaggaggagccactttctagggaaaactgatgtctcatttttgagagtctcctttgctgggtggggggcccttccaacagtttttgatacacaaagatctgcagcctcctgagcaggtgattctgaaagatgcagtgtctctctcccagctttcccactgacctttactgaatttcagacttaggctatcccaaaaggcagtcggaaatttgctcagtggcatttacctaactgaggccactggcagcatgacacagttgggtgactttagggtttagagagaaaatgctggcaggggactggggaagggagaagggtgaggtaggagggatgagcttctctttctcgtattgctatgcgttgctgaaaggcaagctaatagttacccagccagggtcaagcagctggagagggaagttagagaaattcacagccagggccctgagagcagcctgggagcacagctctgtcctgcagcagcagaaccttccatggctggtcctcagagccctgtgaaccagcccacccctacgaggattttcttgctctggaaattcctgaaattgattcctaacaaagttggggggaaaggggctgggcaaatgatttttttgtatagcaggcactgtgttcactgtggggaaagagagaaactgcccctgccttcacagatcttaccatgaagtggggagacaggcgaaaacatgcaattacacaaataatggcttccaattgagatctgtacttccaaggagaggtgcgtgctctgagagggtttatggcggcaaagcctagattggggcatctggaagctccatgaggatgaaaaggaggcagctagggaagggcaagatagagaactgcctgtgagcaaaaggtgcccaggccaccagatgtggggcacacagacacctgcagggccagtgtgtcgagagcagaggcagaggcggagcttgcagggctggctggtgtctcttctcttttggccttatttgcctgcttctggcagttttcttttcatacttacatgtcttgcctccagccttgtctggttcttcttctgcataactatgcctgccttgtaataggaacttgataaagaggacttgatgaaatctgagccctgcagcaagtcgggggtggtggaaaggatgtcttggtgccagtgggttggctgaccttggtaaagacagatgccttgctccttggttaaggattttccctgtggagtcagatacatgtcagtttgaattgtaaccctgtgactttggtcgagtaacttaatctctcaaagtctcagtcacactggtggaaaaatacagatagtgcctacctttatttatttgtaacatatgacgatgatttttttttatgccagacaccgttctgactgcttcacagatattagctcatttaatccttagagtaaccctgtgaagcaggtaccattattatcctgattttataaatgagaaaactgaggccctgagagattatgacatgactactctgtgttaaagtcagggttcagaatgatggaatctggatcttgaatccgcagtctcaactgcttatatttttcttatattttcactccgtgtgggttctggaattgctgggataccaagtgtctacagtgaccaggagggaaggaagtaagatttttggccacagggagccttatccttcttggcatatcacttaatattttcctgtgtctccagtcccccaggctccgactgcctggaccagcagcccctaatgatggtcaggctgacaagctgctggcaggactggcacaggatgccaagagccccctcctccccaggaggaccccttagacagcagtgtcagtagaatgctggctaagccctggccactcctcactgctcatctaactactccgtctacagttctgatccggaatgtgaggaacaaagccatatgtgagctttatcaagtgctgagtctatttcagaaaagactgtggagaatgcatcaaagctggttgcttattgcaccatgatccctgaagattggatccagttctgtggaagctggcagaataatgggcccagactgaccagtgagctcactgagggatgttactagttggtccattgctcatctgccaggtcagagacaggtgggaggcaagagaactaattaaattggcagtggacattttacctctaaaatgtagggcaaaaaaaattgcaaacaggccttttatatagaagctaattattaaaggaaagtaaaaatattggggtgttaaagaaatatgtgactggtttagaaaatcctcaacagatatttatcccaaggagggagatttacaaagccaaatttgctcttaatccttaatccacaaagctgtgatcccacaatttcaccaggaataactgacatgaatgctaattggaactctccctttttcccttcctcctttttatgttcttggacaccagcattccggcattctctctaagtttgggagtcctggtctatttccccccttagacagtgatgtttgagtaccactacccaccactcttttggcattcatagtgtaaatggcactttatcagttgaaaatgtgaatcctgtcaacagcccccagctctgccatgcttatcagggcaaggaagagggagagtgagattcagagagatgtactccaccctgttcattccagaagagtgatagataataacattttccggcaagaaacagcaggaaatctaacagacaggaattaaggcaccaaatgggaaagtcaattgcttattcgctccaagttttgtatttgaagggaatgttatttgatttggggattccctcattctccctttcttttttctagggggcaagtggaatagtagaatcaattatctcttcacaaacgtattttccaggctcactgtgtgtgtgtgtgtgtgtgtgtgtgtgtgtaaatgctcatttaaccttttagtaatgtttcacaaacatatatttctcaattatgtcaaagctccccataagtaaaagaaggaatccctggatttttttttctcatggtgtctcttgtcactctaaaatggacctaaactaagaggtagaataacaataatgaaacaacaacaacaaaatactgcttttgtagtgctacccatcttgtttgtacagtgtttgatagctttccactgcattttccttgcatttcatcaacctcactagttgctgtggtataccgatcacaacaaaaatgatgagcatctcagccctgggcatgcatgattcagcataatgcttgcaatggccttatcagggggtagctgtcattgtcctcctttaccaatgaagacacaggcttagagagattgagtaatgtgtccaaggtcacccacctgacaagtgatggagatgagatttgatccgaggcttacccgatgccagggcctgaccaggtaaaatggtcattctttcggtgacagaattgaggcagaggacttgtgaggtcacccatagatgaagaacggatccaggcacagaactctggtcttgttaattctcacagctgctcttcttacctcaccaaggctaggagaaaagagcatctagtcaccaaacaaactcatgctacagagactctctagtctctttcataatgcaaaggaaaagaattctgaaattctataccaagctgttaggtgttttccttggattggggaatgtagagggattaatgaggacaggaggcagaccttatcagggtgaaataacatgaaaaaatgaggatgaactactctttcttcatctactacccaacctctcaaataaatttcttgcaaaattaagtgaattcttgcttcaaatactcaaatagaggatttatcttgtttgttccatcttgtgtgatgaatccaggtgttttctaaagcagaaggcacttaatgtaggttctttatttttttgtgctgattaccctaattggtgggtttccttccaggatcagcagccaattctccactagagtagtatcactggaccttagggtctatttacagtagcagatgtagtggtcacccaataaaaaagtcgctgggtgcggtggctgacaactgtaatcccggcactttgggaggccagggtgggcggatctcttgagcccaggagttcaagaccagcctgatcaacgtggtgaaatctcatctatactaaaaatacaaaatttgccagatgtggtgacacacgtctatagtcccagctactccagaggctgaggcaggagaatcacttgagcctgagaggtagaggttgcagtgagtcaagattatgccacggtactccagcctgggcaaaagagtgagactgtctcaaagaaaaacaaacaaaataaatcaaaatattgtttccacagtgcagttttagcctgctgtctcaaaagggcctgagatttgctatatagccaagctgtgtggactccacaggagactcaggattagcaccttagagtcttgactgggttttcttctttaaacgaagctgtagatttagctataatgccatttgtctgcgcttactactggatgggcacagtggattctgattcgtagtcctattcagtgaaaatagccaaatcattgtgaatacactttaatgtgaaatccttcttctgaagagcccagagcaaattcccatgttagggagaggcagatggatggaggcagagttagctctcaatgagttaaaggaatgtcagcatcttcttgactatactggtagctggtagaatagagtgtattccatattgtaaatatagaatacagtcaatctagacccaaagaaagagaaaggaggggcagcaggggatatactaacttatgaacttgagatttataagcattatcaatcttgaattgaaaaagtgaatctcttgagggagtactggtggcattccaaaagctaacccaagtatccatctagtttatagcaaatctaggcacataattcccttagatgatggaattgagatggaggacatggaaaatgatcagacacccttcctgcctggagtgtagctcagaatgaattatctgtggttaagggaggggtcaagggaggaaacggtggtactggtgaggcattccaagggcttggtgtgaggttgcagtaggaagtggattccagcttttgaaaaccactgttacatctacattgccagcagaaagctgaatgcctacatggcattggaatggagtgaggcagattgcaaaggatggggctggccttgaggttggatcatatgtggctgtttctttgactgtcaatcttcattcttaaatcttctcacttgaacaccttttattggcactaaatttgttttaggataatgaacgcagctgttccaattatggtgctcaccccactcacctccatgtttcacctctcaaagacactgcctctcccttgggactagccctgagcatggtgaggccggcatgcccagggctgaggctggcacttggagagccctagcgtcagaggggttaacacattatctgggcatactcaaatagtatgagcccatcaaataaacaaacacaccaacttgcaaatgaatagaaacatgtttattagagtagaggaaaaacagctttttggcacattaaccctgtggcatcaggagtggcagctgcagcctgggacgacaggcagggaggaggagacagtaaacgtgcattttgaaagtgcttaacatcaggagagggtatttccaagcaaagaggtgtgtgtgcgtgtgcatgtgtgtgtgagagagagagagagcgagagtgagagagagagacagagagagagagagagaaccatcaaagcagtacaaaggccaggaggcagtggtagtgtgcacataagacctaggaggatgtgggtttgaatcccgtctctttcaggaattgggtggccttgggccctgtgcctctctgagcttctgtctccacacagttctcttataatctgtccttggcaggcttgtaagtgaagatcatatgagatgacctgttttaagcatctagcacagaactcggcactcagaagctgctggataaatgccactcctcactgtagttctacgttagaatattccaagttttccatggttcctgaggaggaaggcagctgtgtgttcaggtagaaaagtatgaggtgtgggacagtgggaaattctcatgagcaggtttcaattgaggaataattcatttttgcagtaggcagattaattggaaatgataaactcctcccattgtaaaattaagaattaaaagtgtttatttttattcagtaaataccaaaccatgactgtagtatacttgtattccaaactttgatgatttaaaaagggaagagagaaggagggtgaagggaggagagagagagaatggctatgagaaagagagcaagactacattctgagttcctacacgtcatcccctatccccaaaatagcagctccacttgtatacattgataaattttcaatgtagcagttcattggcagagagatgtccaatacctaaaaatagcttgatagctcctagcatagatcatctgccatatcacctgatatttcatcttccccactaaaatgtaagctccctgaaggcagagattaataatgcatataggaggtaatctttgatatttaggatgaggcaatgaatacatgaatgaatacgtcaatgaatgaattaatcaatgaatggagagacaaggagaatcagactctcttggactcagggaatcttatatctttgaacactaaaattatgcttctgtcttttcttgctcttctcaacccaccttgcctgacagtttgttacattgtcaaactctgtcatttcttcatttagcctgcccctatttcactgttagccaaattcttacacccacagagatgatcctcaacctttgtatgttcaactcttgcacagtccacaaatcccccagtgcactccacggaaaccactttgcaaatgccaagcctagccttgtgtgtcgccttgatgaatgagtcaccaccagctgtgctgcccaccagacagcttcttggttccaggggcgccgcctgctttgtcgtatagcagtgttagtacgattgtttgaatacttcactgcattcttcccccacagaaaaatgaaagtgctgataccagtgataaaaaacataggtttcataaacttaacacaattgaggcaaagatggaaatcatttggcgtgcaaaaaagagcaaatgtttagcctcaatcgggtgcttatcatacttgagctatctgattgtgtgctcagctgtaaaggaaaagaaaaaagaaaagaaagagaacagacacaatgcagtaaatattgtcagagattaagtctaaaatatacggtgtattttggattttttttttttaggtttctagaaatgcagatataaatctagttcgttttcactctcaggcatgttttagcaatgtgatgtggtagtgcaaaaacttcttccctgattttcttgtcctactttgtcaaacagattcagctgtgtgtttatattttcaagaattgtagtaatgtcctttcagttgcctagtttttaagaaaacatctttgaaaataaatacttgcaatttttcctactcctcccaacatgagtgtccaccacgagtcccctttcgccaaacacttcatgttcctctgagctgtgctgccccttcctttcctctgtacttctgcatccttagtgttttctcttgaatcctgtcttctccttcatggtctctggaggggacactgcagatgcttaatttgtgaggggaatcacacaaacatagtagaccctaaagaaacatcttagttggattttgaagtgggcctagactccgcgtgtttttttctcaacatctttctttcccttactcaaaatatcctgcagctggggacttctctcactggcgctgttggttgttttttggtttgtttgtgcctcatcagcttcctctacctcattttgtgatcattttgacctaagaccattgcccagtggcttctcatttccaagatctctacttgggtcctttttcacaagtctgtgcttgtctcataactcctagccttgttcatgactgaaatatttttttatctctctgtggacatgaaacctacatatacagtcctattctcctttccctgttagctctgatccctctgatttgagttgttctgtctgttgagcctcttttattttgtttctttatttgatgttcatggtggcgttctttgtgaaatgtttggtgattctggattgaacccatctctgtaacgctgaatgaccatttgtctgcttgttgcctgtccttgcattctgatggaggaagtgggcgggaggtgctgctgctggaatgtgtgctggtttcggtaaaaatggggaaggcgtggaatgtgctatggggcagtgctctggtcctggctgtggtgagtccttgatcctcccaatgtcacctgccttgagaactctgccctgcgaagcggattaagtctccttcctagccttaagccatgcactccatgtctttctgtttggtgtagagatttagcctttctgacttctcccactgcaatgagatgactaatgctgtgttgcttccaaccatctcgagactttcatccccctcttgacatgggcacttgccatggttggttctctctgcttgctatctttcagggattattcaagttcctattcttagtatgtttctcttcccttattttgtgtgggtttggctggggcagggagttcagaaaggaagagaagattttatttagcaagccacctaaaacaggaagttgccttcttcgctgagtctgagacatactgacttccagaacatcacgaaaccaataggatcacagcccagggcctgaatcctcttgtttgaaccttgttgtagatgcacaacctgtgcatttcaaacgtaggaagcagggtgcacagtgggtacttgctctatattgaatgaaattaagccaatgtttcccacaatgtgtgtgatagatattgtgaaaatgtgaagtagaggaggagtgagagggaattcagtgtgctggtggtatcaagcgtgcaaactctgtttaagaactcctttcacaaaagttttaagattatcctttctagcttaaaaaaccaatatagacagaaaagaaaccccactctggtgctttctcccttcttccattcctgccttgaccatcccttcttcctcatagcctagaagcagcctctgggcctccaccttcccttttggttgtcccctcaccctagtctaacacttgcctctttgtagagaggagcttgtcggacacatgggattcacgggccaggtggttcagcagcccaacaacctggatcctcctcaccctcctctcctcatggccagcccagctcagggccgcctctgagagtctggcctccacaaaggaagatgaaatgtagagacgcatttgctgcctccaagtaacagtgcttcaggtgtttacctttcctcaagtcatagaactagagagcagggcgaggccttagggactgtctgttgaccgattgacacattctttgtattttgaaatgaagaaactgaccctaaacccgtcaagtgactttcccagtaagtgtgtggtaccggctgaactcaagttcagatcctaggttagcagtcctataaattgagaaacagaacctcactactcaagccaagctgatgtctaccccaaaccaaacatccaagtatgcactggggtaggtgctttgtgaccagttcccatggactccacttgagagcccttcgaatcctcccccgccccacaccaccccccatcaccccctgccacgagctctgcatcagcctcagagcctggtttgtttcttcagggtatttatgtcaaggattcccaaatttgttattcagttctttccccactgattcccagctccattcctcagccacacaccaagctacacagtgcctcatggactcccctcctgcaatgggttctctggagtccctcctgcagccttttgagggaggtgcctatttcttccagattagagaccctcctgtcctctagatacctgtagctctccaggatcccccagcttcctctagacaagctcatatctcaagcagtgtgcatccaggaggggattcttccctccacatgagacataggccccaggttgagtggcagaactgcctcttcaggccaaaacccaggcgtgctgcctcaacacgaagaccacactttggcattatacgtcttcccaaagttacaatacatccaccccctgggcttcgttctagattctttcaacacttaagtgtcttattacaagtctctttcctgtttagggaacgggcaatgaaattgtgtaggcaaggggtgctccgtttacctggtgcattcgaggctgaagacaaggagacattatcctccaaaatacttttttttaaagcaagtctgccctagagtaaagtcttcctaaattttgattgttactgcgctatgaacagaggttgtatccacatttaatggaacatagcagtgagagaaactggaatattggaactgctgtcctccgctgatgaaaggaggttgtaaataacattttgctgttggtaaacacgcacaataaatacagaaatatggagccatgcaaaaaactttcgactctgtcacatgttattggtggaaaccactcatagaaaatcaaacacagactttgacttgcagtcacagaaatagtatactacctggagtttctttaggatttgcaatctctgtgcggttgcaggctctgcttgtgttatcttttcatgagggtctagacctgagtttgcagaatgattcagaaatcagtgtatttcctgcttcatatagtgtgattaatcttttttgattttacatgtctacaaatggtgttagtggtcataactgcaaatgattgtgatttttattggtctagaatgtgaatgtttgtgttagagcatctgcaaaagcaaacacttttgctatgttgaaaaaataatgaagatctaagtgattttaagatggcattttgtgaatgcatgctaaaatgctgctagatttttatttgttttactgttaatgctgcattgaagatatagtagtgctgcagcacaatttttttctatttcttcttttcctttgtccttcaaaaaatacccattctagttgcaatttttgttcaaaaatcaagatagtcacacactaagataagttcactatctaagaagtaaagaaatgtaaaagtaaagcatctcatagcagttatcagctgttttgtgtcatacataaataacattttgcttagcattggcatattttttgtgtacgttctaatagaatggccaataaatcaaagtcatctaaatgtctttatcaacaccttaggtattacactcactgatgtttagcatctttcatattgcaattataaaggtccctcaaaccctggctgataaattattttaggtttcttgtgaagaagggttgtgtttaactattaattttcataccagcttatacctaatagagtgtgtggctaatgaatgtgttaaattaaattgagttagattgaatcaaattgaattgaacagaaataaattgaattgtattgaatgataaaccggagagggataatgcatggtgatctaatagcatctgataataacagaacactgaatttacacgcctaacttaggagatatttgataactcatgagtgggaaaattgcccttctcctatgttcctgggcatccttgccaagtggagatgaatgtcacaggagacctcaggcagttatacagttcaagcatcttctgtatttgtgtggcaggaaattgtgccagaagggtcacaaacctgctttattattctgtatgtcaccaagcaggagctccattttttaaagatttttttaaaaattttcttttgttcagcagcagctggctgtgtgtgggcacttaggaacaagtgatgtgagtgcgtgtgtgtgtgtggatcagatagggggtatcatttgctagttttaattggtagattcaacatcttccactaaccatgcagaagccactggctgaggagttaccatggtaaatcaaactccgctgtgtgattggtagacttctgaagcaggtacagtcactctaatcaactccaggaaagttgaggccatctggttttgcctcacttggaagtaatttaccaccccaggtgcaaaaaatttaccctgaggtcagtaacagtaaacctgcctcaaagatgttccagctgagtatggaagaggagtggtgtgacatagtaatttctgtttgtttttatattttcaagcttgggaaagtgagggggctaatcatgcaagccagagccaagaatagatttggcaggtgctgacccagctagtttcagacagcaaagtgaaaactcctgaagctcattctacagcacttctttaatggtccagttcagaatgtctaactaattgagattttataaaaggaactttgactaagcatcaagttgctgaagaatatgatggaagagataggcttttttttttttatttgagtagtaaggagtgaaattgggaatatttgcaaggaagggaatctttcaacaagacttcactctaaaaaaaataaaagtatgttgggccacaaacattatgcatagctatttaggattgtagatattcttgtaatcagacaggatgtagccagccctaaccaaaatatacacagtgagaagacttcagaatcattagctctttggaatagttagaggaatgtgttcggctcatatgacattgatttgttttggctgcacttgaaatgtgtggtctttgcaagtcaatagaaatgaagtcctttattgaatagtagaaactccatggagtaaattatacaaagaaatggaaggccagggttctcagtctcttgtttatttgtgggagtggataccaggcaggatgggtggggctttcgaaaggaaagctcaggggcttgggagaaaggtcagtgttttagactttttgggctcctagagcaaaataccatagactgggtaggttaaaacaacagacatctctttttcacagctctggaagctatgaagttcaagatcaatgtctcatcaggttctgtgtctggtgagggccctcctcttggtttgcagatggctgtcttctcctgtgtcctcatgtggtagaaggggcaaggggactctcctctcccttttgggagcctctgggaagtctctactctccttacctaattacctccgaaatgctcctcctccaaatacccttgcattggagattaaatttcaatgcatgaatttggggacacaaacatttagcctatggcagtaggaatagcaaagtcagattaacggacagccatggagaaggtcattttggaagctggattcttccagaagtgtgataatcccacaaagctggaaatgggaaggccctgaaaaatcagctggtgtgacttctccgtctattaatgagagggtggaaggccagagggcaatatagataaggaataatcaaaatagtggtggattccaattttacagtaccctgttcagagatgcactgagccagcagagcctgaaaagctactggaatcgtgtgtctccccaccctccggtgccctaattgtgcagttatttcagacttagacttcaatcattttacaagtttaatactgatgtggaaggactgaggtggaattgctctttgtccagattctctttgttctttggctcaagagcagtaaggaatggacagacgtgtccttctttcccctgcctggagagggaacacaattaggaatcctggtatgtgagtctgtctccacttcatctcctctacaaaaagaggcagacatagcacttgtgataagccagctcctctcaccatcttcaccctctctaagcttttagtcaactctccagagagtcagaatctgttaaaacacacttaacatgacccacaaagcaacacaaagttaaggagcagggtgctgtgtactttagcacgtgggcaccacaccattccctctaaaagctaactcaacaagggaaagtgaggagggacatcatgttggaaaagcagtgtgaggaagagaggaggaggcagaaaagcacaagaaggggagatgagagagaaagaaaggaggagagaaaggaagaaaggtaagagtgagtcttttgtgggttgcacactctctttaagaatctgataaaaattctttctttctctggaaaacaaaatgcataggatcacatattgcaaataatttggggttcagaagcccatatatagacttgggtaaggagatctaatctatctatctacctatctatctatcctaacaactgcaatttagcaaagttacatatatatatgtgtatttgtgtgtcagtgtgtatataattgtgaaattgccattaagttaggtacatgttacatgcattgaaatatggaatatatgtcaaacccaatctctcattatccaaaaggtacaagagtgaataatgggaaagaattgagcaaagacacattcaaggtgactgtcagcaatgaagagttaatagtgaggcctcctacaatgtagtgacttctttaagggaagggatttgaagccatgggatttcggatgatttaaaatgagcctcactaaagccctggatcacacagtgcaggaaacaaacctgaaaatagccagagtagcaggcagagaagactaactgatctctactctttgaaccccatggttccagtccatttaattgttcttcaggctaacaacttcactttccataggggaggcagtgtaagtgaccatggcctggggttatgggtcagaacatcatacctcattattttaaatgaataaacatttcaaacaaccactgcatttcattggttttccagaacatgattcattttacccgtgtttcctcatttctgtttaaaaatccagcgcaatattatggatttattgtcacactgacaaggatgtgtgtgtatgttaagattcaaagatcacatttgcctctgctctcacaggaagaggttaggggaatggcacattccactggtttgtctgtgcacaggagtgcagggcatgtgactcttggggaaactcctacagctggctgtccggatcaccaggaatcatgaaagcaggctttgtaaacattgcatgcattcccagacattgaacattgtgacatttcatgaccagctctctcagaagagatgccaagtgtagatgtcctttctggaacatccgtgcataattaggctgcccccaactcctcaccacatacatgcaacattttcctgctgttgagtaatcatttgtgcttggctagttttctgtctcctcaaacatcatctcagggcaaaaaggcacagcgtgtagaatatgcttcttatagcagagttaaccagggcttcctcatctcattactagaatctcctgcaccagattccacactgtctctcttctcacttcatatcttgttcatatgattgttcatatctttctaccactagataatgatgtttagaagacagatctaggttacagtatctcgtattttataattattctatgaattaaaactcataaagttagaaacccttgacatgccattcaagaatttaaattctgattggaacctaacttttctagcctggtagtggaaaaatgaaagatgataaatcatgggttctaatcctgacttttcctacttgcttactttctgttactgggtacttggttaagtttaaagaactgtgtaggcatgtgacatacattagttcatcgtaacaattgggtgaagcaggtgctcttatctttattgcttacattaaactcagaaaggtacagaaacttatctgtgagcacgtggacttgcttcatttgaattcacatccgtctgatgccaatagccatgctatacagcctttctttgtgtatgcctgtgcatccttggtaagtctttattttttttccaatgtaaattggggttgtggggagtgtagactagaccagttgtattcaatatttttagttctccatgtctcccatgaagcacaatttgaaaatcactagaatacctctaacatgatgcctactctaacattctaattttatctctttgtcattatcatcccccttccaacccttttcagcaccatgaatttcatgttcctccatttgaacagtgtcttcttctcagaatgtgctggtcatttctgtgcctctacttcttccaaatgctctgctctctgtgaatctttctcagtctcctccacctgaggaactgttccaaggcttttgcattttgcttacgtctttattgttgtcagccatccctgtattagagctagctggatattcatctggacccttctataggttgattcataaatttttatgatggagactgatgactttctcattttagttttctgtaggatctgtgttagtttcccatgcttgctgtaacaaattaccacaaactgggtgacttaaaacaaccagaagtgtattctctcacagttctggagcccagaagtccaaactcaacttcactggccccacatcaagacattggcagagccgcaggagcgtaggggataatctatttctcatctcttctttcttccagtggcttccggtattctttggattgatacattatctcattcttcaaggccaacattttcaaatttctctctgatgcatattcacattgctttctcttctatatatgttcaaatttgcttctttcttgctctgttatgaattaattgcattgcatttaggacccactcagatactccagaataatcttcccatctatggatccttaacttaattgcatctgtaaattacccccaccccaacctcctccaccaaacacacaccatataagctcatgtccacagattccagggattaggatgtgcatggcttttgtgaaacattttttttttcttttgagacagggtcttgctctgtctcccaggcaggagtgcagtggcacagtaacagctcactgcagccttgacctcctaggctcaagagatcctcctacctcggcctcttaagtagctggaaccataggcatgtgccaccacactcagctaatttggctaatttttgtattttatagggtttcaccatgttgctcatgctggtcttaagctcctgagctcaagcagtctgcctgttcccaaagtgctgggatgaccaggcatgagccactgtacccaaccagcttttgtggaatattttttagcctctcacagtgtgcccaacctttggcttccaaagattcttgtctgtcccacatgcaaaatacattttccccataccaacatactgccaaatttcagcctgttacagcatcaactcacatccaaaatcttacctaagtgtcatcagccccaaaagtcccaaactcagcatctagatcaggtatgggtggtactatggatatgatccaccccaaggtaaagtttctgttcacttgttgacctgtgaaactagaagacgggttatctgcttctaaaatttaatggcagaataagcatagaataacagttgtaggcactcctattccaaaggggagaaaatggaaggaagaaaaggttacccagacccaggcaccttccaaatccagtagggcaaattccattacatgcaaggcctgggaataatcccctgaggctaatttcactgccctctgggcccatagctctgccttctggccttgcaattctgggctctggttccaaagctcagccctcacagtcatctttccttttttcatgaagggtagcacatgtttgcaactttgtagttttatgagcttattttctttctatggaattttgggagtctagcaaccttctttcatttagtcatgtccttgatcctttcagtctaagctggacatgtttctactgatgtaatattctcaaaaacctggtgattctcctgtatgtgtcatagggattcatattattagacaaaagggtcctccacagaatttcttagataatctcatctttctttctgacctatgctgatatccattcatatccaagggtcacatacccattcccttcagttctagcaacagggtgttcagtcatatacttggcgttctctccagaggacattttgttaacagtggatcttctaattttagcatattttgcaatttaaacaagctgttaatttctaaatcaagggtctttttttgcgtaacacttctttcctcaattaatctatttttgctcacattttactataagcagaaagaagaaaccaggctgcaccttgagtactttgcttggaagtctcatcagctaaatgtccacattaatggcttaaaagttttgctttacactaactgtaaaacaattcagctaagtttctgcttctgtataacaaaaattgcctttcttctagtttccaacaacatgcttctaatttttttctgagacctcaccagaagggcttctatggattcgctggtaaagacaatctgggctttttctatcatgcacttacaagttctttgagcctctactcattgtccaattccaaagccagctgcacatttttaaagtgtatttcttctagcaataactcacttccttgtagcaaaatctgcatcagtcagggttaaaccagagacacagaactagtaagagacatcaaaaggggtgcattgcagggagttggctcacatgatgatgggtgctggctaggcaagtctgaaatctgtaaagcaggccatcaggaatggcagctggagctttctggcacaggctgaagctgctgtccacaagtgggatttctttccagaaacctcagttctgcctgtagggcctttcagctgattgggtgagacccacccagattatccaggatcatctcttttatttaaaaccaattttatttttgaatgttaatctcatctacaaaaatggcttcacagcaatgacgagattagtatttgattgactaactgggcattgcagcctagccaagttaacatgtcaaactgaccatcacaggttagtaaacacgtcacacagccaagttaacacaacaaactgacgatcacaggttagtttacacgtcacacagccaaaacacgtcaaactgaccatcacaggttagttaacacgtcacacagccaagttaacacgtcaaactgaccatcacaggttagttaacacgtcactcagccaagttaacacgtcacactgaccatcacagattagttaacacgtcactcagccaagttaacacgtcacactgaccatcacaggttagttaacacgtcacacagccaagttaacacgtcacactgaccatcacaggttagttaacacgtcactcagccaagttaacacgtcaaactgactgtcaccggttagttaacacgtcacacagccaagttaacacgtcaaactgaccgtcacaggttagttaacatgtcacacagccaagttaacacgtcacactgaccgtcacaggttagttaacacgtcacccagccaagttaacacgtcaaactgaccgtcacaggttagttaacacgtcacacagacaagttaacacatcacactgaccgtcacaggttagttaacaggtcacccagccaagttaacacgtcacactgaccatcacaggttagttaacacgtcacacagccaggttaacacgtcacactgaccatcacaggttagttaacacgtcacacagccaagttaacacgtcaaactgacgatcacaggttagttaacacgtcacacagccaaaacacatcaaactgaccatcacaggttagctaacacgtcacacagccaagttaacacgtcacactgaccgtcacaggttagtttacacgtcacacagccaaaacacgtcaaactgaccatcacaggttagttaacatgtcacacagccaagttaacacgtcaaactgacgatcacaggttagttaacacgtcacacagccaagtaagttaacacgtcaaactgaccgtcacaggttagttaacacgtcacacagccaagttaacacgtcacacagccaagttaacacgtcaaactgaccgtcacaggttagttaacacgtcacacagccaagttaacacgtcaaactgaccgtcacaggttagttaacacgtcacacagccaagttaacacgtcaaactgaccatcacaggttagttaacacgtcacacagccaaaacacgtcaaactgaccatcacaggttagttaacgtgtcacacagccaagttaacacgtcaaactgacgatcacaggttagtttacacgtcacacagccaaaacacgtcaaactgaccatcacaggttagttaacacgtcacacagccaagtaagttaacacgtcaaactgaccgtcacaggttagttaacacgtcacacagccaagttaacacatcacacagccaagttaacacgtcaaactgaccgtcacaggttagttaacacgtcacacagccaagttaacacgtcaaactgaccgtcacagtttagttaacacgtcacacagccaagttaacacgtcaaactgaccatcacaggttagttaacacatcacacagccaaaacacgtcaaactgaccaccacaggttagttaacacgtcacacagccaagttaacacgtcaaactgaccatcacaggttagttaacacgtcacacagccaagttaacacgtcaaactgaccgtcacaggttagttaacacgtcactcacccaggttaacacgtcacactgaccgtcacaggttagttaacacgtcacacagccaagttaacacgtcacactgaccatcacaggttagttaacacgtcactcagccaagttaacacgtcacactgaccgtcacaggttagttaacacgtcacacagccaagttaacacgtcaaactgaccgtcacaggttagttaacacgtcacacagccaagttaacacgtcacactgaccatcacaggttggttaacacgtcactcagccaagttaacacgtcacactgaccgtcacaggttagttaacacgtcacacagccaggttagcacgtcacactgagaatcacaggttagttaacacgtcacacagtcaagttaacacgtcaaactgaccatcacaggttagttaacacgtcacacagccaagttaacacgtcacactgaccatcacaggttagttaacacgtcactcagccaagttaacacgtcacactgaccatcacaggttagttaacacgtcacacagccaagttaacacgtcacactgaccatcacaggttagttaacacgtcactcagccaagttaacacgtcacactgaccatcacaggttagttaacacgtcacacagccaagttaacacgtcacactgaccaccaccgtgcttgcctgtattaagcccttgatgcctgtgtatctgttaaaatgaaagactgtgatagtagaatgttcccttcctatcagtgaggagatcatttgattcaaatgtgggaaaaattaaagatcatgaaaatacattagccatgattataatgggagtgtggggaagggcatggtaaatatttagaataagctaaacttctaatgaaatgagatctcctcagctggggctggtggacccagatgagcttcagtgggtcatgaacctcccagaattatatggggtgtgcgtttttgtgtgaaagagagaaagaacattttttttttctggaattagagttcatagcttttatcagattcacacaaaaaagtgcgttgtattataaatgtaactacctcatatatatggtaaccaggtcatccatcagtagcaataggcctgtattaggagtccttgacggtggatctaataaaatcttctgtgctcgtaactcacacctacctggatattctagaatcagctcttggagaactcagaggtaatacagatagtggttcttatagggattggctagggcaaaattaggagatgcttgttgtaccaaagtctactggtatgtttcctactaataaatcatgcctgatgcccccaagtcaatgactcgatagaggaagtgagtgatgaggcaggcagcataactctgtgaatgagccaaccccagcccttcccctgacttaaaaaggggttaatgaacacagatggctgcaaaccccccaagcagccagcatactgtaaaacaatattaacatcattgccttttgaataccatgtcttgtaaaccccaggatatgacaagcctctttagaatcttctttgattgtgttactcagactcccgtagggaagtagggaggggtaggggtagataccagaggaaatgtgtaattaggagtctcttagaacaataagggttctcaaacacatatgtgtgcaactgatttgttgcttttggtatttctgttggtgagtaattaactaaccatgttttgggggcagtctgtgcaagcttgggcaatctgatagttgtgaaccatggggaaagaatagttgcctttagctatattttcagaaaaatactaagtggagatgtgaatggaaaggaaagaacagactttctggagagatgccattatggtaatgtcagaacttcctttcagtctcagataaatctttcttgttatcacccttatttttagttttactcaagacaggaggcccagttcagttggagagtgccgtgtacacagatatccctgccacctccccgggagagaggcacaggggcctctgcgggactctggccccttattttacggttgtgattcctcctcactgtggtgcctgtgtgtggggtttcagggagaggggccttttgatttgactgctgagaggaataggggttttctcctgggaactcttctgagagaataagcttttgacaaacactctttgaaagttactctatggccagatgcgtgcagatccaaagatggtgtcatttgtgaaaaatgaggctggcttatgagctgggtccatttgcacacagcctgcagccacggagtccctcagcttggagatgtgctagctccttctgtcctgtgggctgctggggctttgtgtcactggcatcagaaaacagaatttggcagttctctaggctaagggtttccaaactaagtgtcctctgtattaacaacgaggagccaaaatggggacttttctatttgtgaaggggatccagtgaaaataaactgttttattttggtgactttgagtataggaattgtcttctctggacctcagtttatccaactagaaaaatgggagcagaggtgcctagttatctttaggaatgttctgtgacttaatgaagcaatatttatgtaatgatttggtggtgtaaatgtccccagcagtgcatgatgttagttgtatgtttgcaaagtacctagctcccctggtaaaggtaacctttgtaaatggcaagctatgagtattgttaaaaggacatatggctccaccttctttccaaaaaagatcactgaggaatatagggccagttaaatagcatagaaagaggttcagagtgtcttgacctggagcagtttttaaaacctcaggccaaaactccactaggaaactcaccaaactaaccattatggtcaatttcattttgaaataaagcaccctaattcatctgtccaggagtccaggttcctgtgtggcccaaggttgcattcggaggtcagagtaaatcctgtcgctaaagagccactccttctagaaatagctttttttaatgtctgcaatttctcaattcagttctttgactctttagttctatcccatttctggccacaaacctgtttggggtttgctccaccataagtcaacacatgcacatgctttcccatcagttcccagaatgcagaggacactgtaggtctgctaaggggcttctttcagaacttctggggttaacgtggttggaatgtgtgctaacaggctgctctcacagtggcagttctaattggctgaggatgagtcttgaaatgtcacagaaagatttatctctcagcacagattctccctcaactaatttttcagtaggccaccagataatgggttgtttggaaaacaatatgcagttctcagatgcctttctgtgttggaatgaacttggtaggctatttgaagcaaaatggctgatggcaaggaaactcttgactgacttacaggccattggacactgggaacaccaggccttgcttgtgagggatttggctgagtcagtttctcagggtccatcaccattcttgtggggactcagcacacaggtgggtggggaaacctgcctcagaagtttggcttataaagaaatatggggattgatatctggatccttttatatcagcagcaaggattaattttagagaagatatttcataaaaaaatggattcttccctactctcagtttctcaggaaaaatatatttgcttgatttgaaggtaccattgacagttagctgcttgttgatttaataacagctttttttttttaggattaagagaaatagaaaaatgggcaccatgttcaacatacatacagattagaagataaatttctatttcagaaacattgcaacactgttcgcaacaaccaagatatggaaacactaaatgtccactgctggataaatggataaagaaaatgtggaatttacatacagtggagaaatttgttaaagaatagaaacttacagctacacagtatggataagttctggtgttgtataccactgtaggatgactataaaaataatacagtatgtagtttcagatagttagaaggaggatattgaatgttcctaatgcaaagaaatgataaatgcttgagatgatagatatatgaattaccctaatctgatcaccataagttgtatgtattgaaaaatcactatgttccctataaacatgtacaattattaagtgtcaattttttaagagtatataaagatgcatacagggaatgctgcaatatgtgacatcatggatggaccttgaggacattatgctgaatgaaataaaccagtcagaaaggacaagtactccatgattccactgatgtgagatatctaaaataagcaaattcatagaatcaaagagtggaatgatggtcaccaggggctggaatgagaggggaatgagcatggagtttcagttacgcaagatgtgtaagttctggaagtctcctgtacaacattgtacctctggttaccgtattatacactgaaaatttggttaagagggtagagctcatggtaagtgttcttgctgctataaaataaaattttaatcaatacatattaaaatgtgaaaacatattttgtaaaactaaggtgcaacaatatttttggtgactcaccattaaaagtcctacatacatttgctctagaatcctattccaagatgggattccaagttgattttgcatttctaaggttagcaaacattttgtcttttattggttgttttatacatatgtatacctatgtagcaagaaaatttctgatgatctcaggttcatacacagctcttgtcatttccaaacagctctggatttttcgagctattattagcctggagagtatagataattgcagtctacacagaaatctaaaaataaactgtttattcatttttctaaagaattcttttagcacatagcctcttcccagaaaggtttacaagtgcttagattaaaggataattcttttctctccctaccattccactctaaatttctgaagaaaatgtgaaacagcctaaaggcagaaaaggaagtacagtaaaggtcttaatctgtctctcagaattattgaaaattggctgaaaatctaattcttcttatgcaataggtaacctttttattggtggcatttacctgaactaaggtaaatgtcgacagcattggtgggtatgtaatcaatagcatactttcatcatttattttttttaaacaacagatacaatagtattgattactccatacatttcatgctaaatagctgtattaatctgacttaatgagtatgtgttgttgaaatagctgtcttccaactgtaacctgtttttagcaagaatcctgcttgccaaatacttctttttttaatctatagcttctacttgattcttgtgaaccaggggtcagcaaactttttctgtcaagggacaattagtaaatattgtagactctgtggactacactattactgctgcaacaactcaactcagccatgcaatagaataagcatggcatcccaataaaaattcacttaccagatctgcaggtggttgggacttggaccatgggctgcattagctgatccccattgtgttccaaggttggagaaagaaagcaaaatcaacatcatgatttgttgaggccaactatggagaaggcatggtttaacagtgtagtggacaagctgggcaagtttcctgcttttctggagctaacattctcttggagagtggggaaatttgaaaatcaaatctaataagtcagcaaaataatttcagttgacaataagttctatgggaagaaaagatgatttggtaaagaacgacttaagacttaagaggacataatttgtagggggtaatatgggagtttgaacatgcatccatgtttttgagtcccacaccaacatttttctaaggaatctctcaacctcattttttctatttataaaataattaatatcaatacttattgcatagggctacattgaagatcagataagctttatgaagggtcttctgtaaaacagcaaagccaattacaaatttattatatcttatcaatattggtcttgtcatcatttttattacccatctctttattgtgtctcatgttttctttgaagtctttttttccaaaacataacagaatctttaaacgggattgtgtgaactgcaattctttcccttcatattccctagaagaggatttctctaagtcactgacaagttgaaactgctttcttcacattaagctgacttgagaaatcagtgtttaatattcacactttaccttaccctactagaatatcagtcattgccgccagccaaccctatggacttgttggtgacacatgcgaaggcacagggtgagctggtccacaccttcagatgaagagtgtgaaaagacttacaatttggtcttgcatattggaagccttagaaagacatctgttgataacagtgatgagtgacaaacttagataattaaaccttcttgtcttcaagtctttacttgatttaaaatgatgactgaaatgtctactactgtgtttccacttactggaggaagatctcaataaaagtttgggccttgtaagaaattcatgcctacagaatggaaagggcaagagggaaaataccagcagctgtcttttgctgagcccttagaagccaggaactgggaagtgtgttggattcaacttttcttcaacccccactatctaacccccatcacaaccttcaaaggagtaaaattctccttttccacaagaggaagtggagactcagagagactaagtgtcttctcaaagctgtctgactgataaggggcagaggcaaaattcaagcccagacctgcctgatccatagccaatggtgtgtttaccagacagtggtctcaaaatgtttttgattgcttatagccaacaatagaagaacaaagcatgaaaaatcaaacaagcaacaagaacaaactttattttttggtagagaaaggatctccctttgttgcccatgctggtctcaaactccttgcctcaagcaatcctcttgcctcagcctctggaagggctgggattacagttttgaactcccacacctatccaacaaaaaacttttgagtatcactcataatatacgtatatttattggcaagttaaatccttataccattatactaatgtgtattgaacaaataatcaaacacttgaaaaatagaaatgtataaaaggatgcactacaaataaatatacatggaaaaactcatattttcttgccccacacgaggggatcatcacttgcttctcagtgtctactttgaacaccatgacactaaaccaaatggacacatcaggtctaacaatgtttgttctccccagtaaagtcagtttaatctctgtttagccttgcctacataggcttagtttctcaaggattccaaatgaggactgcttggcctggtgaggctagtgcaagctgctggaactgacacactcacggatgtgcggcttcgaacctcagcaaattggtagcacagggttagcatattgcctagagtcgggcttagtttccctcggtgtggctcaggctgctacagcacacttagcactggggtacctgggtgagtgccaccggtgacgctagcagtaggctctggccatttcagaaaatgaactgcttcttccagcacacaaatatcttgctaattagcaattagccgttaagggagaagaaatggaggggaactgggagtctgaaataatctcctaagagacatgaaagaaagcagcacttaaagtaagccagatagaaactgggagctgcttcatttgggcaagatgtctctagacatttttctaaacgttttacattcagcagaggaccccagtgcattctgccaagtgcttttccctttaatttttagatgcattcaaatttcaaggggaatttaatccgtatgtttctggttcttttacacttaactcatcaaaatgttgttctttaagagccgttggatctgtaaggcttatgagcctttgttataagccttttcaaaacctctttcccctttttgaatcagcaaatggaattttgccaattctgaatgggatttcaataaggagaagtccaactttaggattaaatgcagaacctcaagagcatccgacctgattttgcagagatgcacacttgacccttgcatcctaggaggaccgacagcatcatggggtcgacccagtggctggagcaatgcttggtgagcgcgagcccacggaagacaagcaatgtggttcagggcctgtgcttctgttacagaaccagcaaaccttagacttagacattctctagcccatcctcccacccaatgagatttgtgacacataataatgaaaataatgatactaatcagtagccgacactcatggaggccacctatatttccagctgcttttctacactctttgtatgcaacatccatctctcataatccttatcagaatggtgtgaggtagatgtggagttagtaaaacttagtggacacaagtttaagatttagaatcaggcaacctgggtttgaatcctagcatcaacacctataaactctagcgcccgaagaaagttctttaatgcttgccaaagggtgctttcatttccagttgctcctgttaccatcgttgttaaggatgatgttgatgctatccttgttccagtgatggaaaaagtccctatctcctggtgcagccatttttattggtaacttggagttttccatattttctctttatgtgtcaaaatctcctgttttacaaagtatgcccattttttctaaaatagagttaggctaactcctcttttgcatggcagaccttcacattcttgatgacaattgtgaacgtaacctggttgcatgttcctgacactaaaagtgtacacaatgttctggatggggtctgtccagtatgaagtaggaccttgctctcttttgttttgtattttatactattaatatgattgcataatccattaacttttgggaagccacatcacacctttttgttcatctggagttaatatcacctaatataagttttcctttgcttgaactgttcatagggcagtgttccatctcttgtaattctgtagttgattttttaaatttcgaaatatgacattttctcatgggctctaatttaataaaaaacaaatatggatttggtggagaaaaatatacatggtacagggttttgatgttaagtgtgggtatgataaatgtgaagagtttctgcattccagttcctatattaaattcatagcccccaaattttaaactttcagagcctcatcctgaagagtcattatgaaactcaggtaagttttatcatgaaagaatgctgaaaaaaaaaatcaatgccccctggccctcccattgagtaagcaactgaaagtgagcttacagcctgtgtaggacatcttttaatttgccaagtgactaaatgtgcagtcactgcagcaggcatccaccagctgtgcccacatggcccactcagctgggctgcttttcaaagagcagacagggcttatcttagtaccaaaactccatgccaaaaagatcatcactgggtttgagcatttgcacaaaatccccagcagccacgggtagacagctttgcttgacaaaggcagcttcattctccagactaatgggcaactttggctactactgggcaccatgataaaatggctgggcatagagactgtcagccctactggtgattctagccatttggccatttaccttttacctacatttcatctctgtattcccttgggctctgggaagccctttaagcttcaatgacctgttctgtatgagtgctggacagtccctgcaggttcttacttaacctgagagcttgttaaatgcatctccatggaatatcttctattgttaatagttgctggtttggattttaatctaaaaaaaactgtgaaatgtgcttgtttcatatgatgcttttctgagaggttgcatggagatctaatagttgggtagctgatggcaagtgggaatgaaggtaattgattaagcagcagcacctgtgttcctgatatgtacccagtccagtgctagatacagtaaaaatgtaaaagtttagggcaaggtcccatcctctacccagttttgaggactacataacatagttgaagggagaagtttcatgtaaaggaagtaagataagtatataaaagaataagcacatagatgctaagggatttggcacaggctgtaaatgctgtagtccctcaaatgaggaagagttcactgtcactgagaatatcctggaaggtaagacttcatctgggccttggagctgcataggaattagactggtgcaggaaatggtgagacttggaaatgagaatggataattagaaatttgtcatgtggaaatcaaacacacatgcatacctatgtatacatattacactacagaaacaataacccaatactacttcattttcctttaattccctaataactaaacagtacctgattgtgggttccagtagtgatgtacattgacatcttgtagtaagaccttttttcctatcctaagaggatggacaatacatcttcaaaagccagagtggttggccaggcacggtggctcgcgcctgtaatcccagcactttgggaggctgaggtgggtggatcacaaggtcaggagatcgagaccatcctggctaacacggtgaaaccccgtctctactaaaaatacaaaaaattagccggacgtggtggcgggcacctgtagtcccagctacttgggaggccgaggcaggagaatggcgtgaacccgggaggtggagcttgcagtgagccgagattgcactccagcctgggcgatagagcgagactccatctaaaaaaaaaaaaaaaagatagaagccagactggctctttaaatctactaacacttgtatgaagtaatagctttcaaagtagtatgtgaaccagctacttggagggttgtggcaggaggatcacttgagcctaggagttcaaatctagcctgggcaatatagcaagactaaatatatatatacatatattcacgccacacacacacacatattcatatatatatatttatatatatatatatagtgattaaaataatgcaattgctggcacagagaatatgaaaagcaactatattatgagaggacttcaaaaattcatggaaaaatggaattaaaagataaaaaaaaaaacccttcatttctcaaaaaaagcttcatcaaggttaaaacacttttgtaggtggtgatcctagccatttagtccatccctaaagaattgatggtcctgggaatgatgcagaattttcccccctttgttcagctaaatccagttcttgtttcatgaccaggaaaaattaggcacacggacacattgaaaggtgaggagggtggaatttattaagtgaaaggaaagctctcaacaaaaagagagatcctgcattcaggtttccccctcacaaattgaataccaagccaccattcatgagttgaagaggcaaggctcctcccagcataaggcatgaattcctggtggctccactccattcccccggtatgcatgcaggtccttagtcttctaaaaaatcaatgcgtactccatattgatttattttccttactgggcatgtgttaagggacagaattttccatcatgggcatgattaggcaagccccctctgcacaatgacttgggcaggtcagaggttctctggagactcctccctatttgcctaggcatttggctgtctcctccctctatgattcccccatgtaaagaagtacatataactgctgttagaataaggacaaggatgaagactgatcttaactgatcctgctgacagggggcactgtttggggaaaatggcagtcagaggcctaagggtccctggtaaaatggggccattgttcaaggctctggttgcatgaccgtttggagtttgatagcctgaagccaagaaaggacaaaccgggttattagaagacatgtaccaaaatgaaacaaaagcgagggtaaggacggctcaaaaattctgaggctgctggcaggctcagataaccggtggctatagttatttctgctaagatttgggtgcatggcccttggtttgtggttagctcccttggtcttgattttcccaaaaaagaaacctccaggttatgggcactctattactcccatcacctggcaggatttgcaggataattgcccagaactggaatattgattcagatttttatattacccatccctttttgtttcttctgagttgcagccagacatcactgtttacttcagaggaatgagcaggattagtttaaaatgtagatgaaaaacttaatgaatgagtctagaatttaatgacaaatctatgattagctttgaaacagaatttctctctccagtccttatttttgttaaaaacaaatagtgataggactgagttgtttgcaaaataaactttagttttatacttggcctgattatttgcataaagtgcagcaagaataattatttttacataggcttttaaaattggctttgagggaagtttgttccacaaggaatctcagataggactttttaaagctgagcctagccatgggtttctatcctcaaatatacctatgagttgggtgaattcctctcttcttgaagtcacaagaatatggagttcctgggcctgtgagaaagtgacattctttactcaccacaggtgaggaaccctgtaaggggactgtgtagacaaggtatgaggccaatatccccagggggcttttattggctctgcaagttgagcttgattccttaaatggaagcatacccttacagtcaaacccttagcaaaagaaccagtgtctccaattgcatcctcttgcaaaagaaaatggattcttattgcactgatgcaaataaccatattgccataagataagaatactcacagatagttttcaaactctagaggatccaggcagagagaaacaaatgtgctccaaattttttcacaggagtctaccttactcaattattaaagactttaaatagttcaaaataaaagtgcccttgactcagaaaaaaaaaattagcaatattttaagcaaaagttaaaaaaaaagattacttcagttttctattacttcagtctattcagataactcttgttctgcttgatattcgtgaaattttcagctcttcataagtcctgtatgtttttcctttattccgatgtcacaattttcaaaattatcagaaaactgcatttgacagcacctgtcaaattcatgtagctgattataaaccatcttttgaaggggataaaaacaagacaacaattgtctatgaataagaatatgtacagggtcgctacaatcaaaaacatgattgacaaagaaatttggttatctttgtggtttataatacttaacacccttaattatgattgatagcatatactcagacattaggattttagaaatctcatacaattttgtgacatatactaatattatttactaaaatataacctgaagaagattaaacacattttgttaattctatgtacctaaacatgtcagataatcctgttcatctctcatctggatgcctcagggaccctccatggcatccaaaagagagagttcaagaaagacaaccttgaagctgaaatttgattttgggaagcctgttaaatatggtagaggtttaaaacacttgatgttgtgaactagaatttcagattaccataagttatttattttgccaaagtgataacttgaaaattattttagaaagacaaaaacctttactcattaagaggaaatacttagctttccaaaaaatgtctcctgtctttctttcttttccttggtagtctatgcatgaggcaaacaaaaatatttcattatcttttactattacatgaaaatcttgtaccagggagagaaagccaaattttacccttgcattagtttactattgatgtcaaccccaatttattaaatgaaaccttatagaaaattctatgcaatcttaaccagcttgaccatgagctgagattcttgtaaatcttttataaccctttacaaattttgctaatgagtggattagtgccttaagaaaacctttgtgcttttatttcaatgctcaatttacagagtttagtcaatgttcacacacagaattttgtttgcaagattaatttttagaaaccttctataacttgtttaaacctttgtctttatcttatctaatttaaagcaatattttatcccaaggcaaaaatgtacattttcatgccttcttataatcttttactaaagacacattttactgttcttatacaccttgcatgtaaatgtattttcagtggtctcaattacatgttataatggtacttcttagcaatttttaactttaacataaaatctggtagattgttttaattatgcagtaggtgccaataaagttttactccttcttgcatggtgaagggtgtggttaattccatatatccccaggccttaacaattgtgaagcaggcaagtggagcagttctcaacagctaaagaagcagtttataaccttaaaacatttagcaaacctagtatctgacccgtataatttagaccacctatttacattttaacaacatttgcattttaccagtaatctttaagactgtttttatttctcaaagattaaagtcacatgaactaaaaggcgttaaagcttttatttttccttcaaaagtatttcagttaagcacttatttttctttagaccaattaattagagctcttttttatagatatcatgcacatcacatatataactacacagacagaagaagattcagttgttacaagatatttcatttgcaaatctcctaattggattattggtctctgggtggtgccctttaagagcagggttaggaaagcatgctgtttgtaggccctgataaacagacacagctggaagacaaaacatattttgagagggatttatctgcctctattttctgggggttccaagaggaaagcagaggtctctttcaaaatggaatccacggtgccttttctgtttttcccaaggagtctcagagcatcagaagttatcttagggcctttcatacatgcattaagagtggcaagacaaggcagggcacggtggctcacgcctgtaatcccagcactttgggaggccgaggtgggtggatcacgaggtcaggagatcaagaccatcctggctaatatggtgaaaacccgtctctactaaaaatacaaaaaattagctgggcatggtggtgggcgcctgtagtcccagccacttgggaggctgaggcaggaaaatgacatgaacccaggaggcggagcttgcagtgagccgagatcatgccactgcactccagcttggatgacagagcaagactccatgtcaaaaaaaaaaaaaaaaaatagtggcaagacaaggtggagaaaggtaattcagtcgattgaggaaaaaaaaacttttctccagcaaaacaagatccaagaagagaaaaacataaaggccttttaaatatacctataacttggatacccccttttaattaagctgagtgctgtttaagaaagtccttttaagtcccttattacccgatgttagccacaccatgtgtccaatgtttctggcttttgaactttaccaaacgtgacctcacaggtgaaaccaacaagcctcaattaagacgctaaaagcacaccagattagctacagcttaagcccagtctcgtatattctttttcattaatcaaaactttacagtaaatataaacagtgatccttatcattccttttactggtttgcacagggagagaggggccaaaagtccaacaggtaaaaaatattttacccttttgtcagtgtgtcaggcttctgggttctcttcccctgagctcaattctaagccaaccagtgtcaggttttggaaattaacttttctcagtctggaggatgcatctgaggggagtgtcctatagtacagggacacagttacccatctgtaaagaggggacagaggagtaaaaaagaaggctttcttcttccaaaggagcctcagaggttcaggatgcattcaaaaggaaagcagactgaagatgaatggctgctcacctagaaagaggggagccctgcatccctggttcctttctcttcctagggaatacccaggatatgtgagggagaaaagaaaaaaacgtcctttttccttcttctgtccttatattcccaagtcccagtgaccttgatagggtgccacccatggttgtcagtgtggctttcacccatgctaaggggaggcctagagggtaggattatccacttttgcccacgtactgcctttccctctgctgtcagtagcctttgagtttcctagacctcatttatgccatggatactagcatgacctttatccatgaaacaggaggcttggcttaatcagcaagaattagtcatgctcacctacattgtgccttttaactactgttgtcatctccctctggatccctcatatccagttttctttcctaggggttgaacccaaggcttggaattgagtttgggacaaaggaactgcctcaaggaggtgcctggtctcatcaatcccccagtgacccacaccagactggctgctacctccttatcataagcccagtgctaaggtataactgtggaatagggtccttctcaaacaaggaaggggaaaagggtgtcctgtgaattgtggtcctggtctaataagatgcttttcaagaaagaaaaacctctcacataaaagttaactcccgacagggtggagcaaagggaaaaaaaaaagcttaagtgctgggccaagaagacctgggggaagaaccttttgttcctttgcaaatgggtttctccaacagggagagaaacttttgattgctgtcagatcaagttggattaattgaccaggggaagagaagactctgtggatgtggatgcatagtgggaaatgctggccagccggctgcacagggcccaggtccctgaggcccccttgggtccccggcattggctgtggctcattcccatcctgcatggccattggatgccacatagacatgcagtggacacagccatgcaccccagccaagagggaagtggggcagggagccaccactcacccgtatatcccacatgcacacctgtggccattgggatggtggtggaacacccccaatattgtaaaagaaaagataaatgctgttacagtaccaataaaaggaaggaaaataccatagaaaatacagggttggattgaggccaacattcccgacccctgagagtgagtggggtgggggacgtggggcagcttcccctgctctcagaaaaagtctgaggatgagaaagctcagaaatgaaagggaaagatatttttgggttcacattttacttacccttcctcatgtccccatactggccaccaaaatgatgcaggattttttctccttagttcagctgaatcccggttcttatctcacaaccaggaaaaattaggtacatggacacactgaaaggtgaggagggcagaatttttattaagtgaaaagaaagctgtcaacaaaaaaaggggtcctgcatgcaggtttccccctcacacactgaataccaggccaccacatacgagtggaagaagccacgttcttccccagcataaggcacacattcctggtggctctacccaattcctccagtgcgcatgtgggcccttggtctgagccagtccacattgatttatttcctttacagggcatgtgctaagggatagaatttttcaccatgggcatgtttaggcaagccccctatgcacaatgacttgtgtgggtcagaggttctctgaggacacttccctatttgcctaggcatttggctgtctcctgcctctatcaggaatttaactctgtcaatgcagtcttttttgcattattaactgaagaaaaatgggtcccctttaaagattttttttttttaagatttggaaacaaaaagaagccagaaacagccaaatcaagactgtaagaggaatgcctaatgatttcccattgaaactcttacaaaattgcccttgtttgatgagaggaatgagcaggagtgttgtagcagtagagaaagactttctggtgaagctttcccaggtgcttttctgctaaagttttgactttctcaaaacactctcatagtaagcagatgaaatcattgttttgtcctccagaaattcaacaagcagggtgctctgaggatcccaagaaactgttaccatgagccttgctcttgactggtgcactttggctttcactggagcacctccactttgtcttggtagccattgctttgattgtgccttgtttttggaatcatactggcaaagccttgtttcaattcttcaaaaaaatgcttcaggatcttgctcccacttgttcaaaacttccattgaaagctctgcttttgtctgtagcttatgtgggtgctagaggtttggcacccattgaggggaaagcttgctcaatattaatgttttaagtcagaatttggtaagctgaactaattgagaagactatggcatttgctattgtttctgctgttaatcatcagtctcttcaattaggacacaaaaaagatgaattttttcataacaaattgatgtgaatatcctgccctgggcttcgtcttcaacattgtctcctcttttcttaaattcagttattcatttgtaaactactgatttctttagggcattgttctcataaactttttgtaaagcgtcagtgatttcaccattttccacccaagcttcaacataaatttgatgtttgttcttgcttctattttaccagaatttgtgttgctctgttaaaggcttttttcaaaatgtcttattgttcttagtgcctcaaactagatcctgttcagaagttttataaccagttagtatgagtttattttgatgcaaaaaaattaaaattcaaggttttttttataataagtattttctatgatcattttaaatacttcttgtatttacacttcatggagcccttagtgtatgctaatcactcttccagatgctttgtatatattgtttcatgtcatcctcacaatatccttggagggtaggtattattatccccattcacagacaagaaaatgacttacagaaagattgagtaacttgcctaaggaaagacagttaaaaagtgacggaatgagactataaaccaggtattctgactctagcagaaggtgagcacttaaaccatgggctatatgtaggaaaataatctaaatctgcctggcaattaagcacttgcaagtcaccttcttataccttgtctccttggcccttcacaccttccctatggcagagagcgtgttaggcccacgaaaaagctgggacacagagaaagtttctcttaggttttataatctccctttctgctcagacctcctgtacccagggtatgagtcttccagtgccccaccctctcagtgttaccttcccatgcccagtaacttcatctgccctccgttttagggtgccatctatggttaccctctgaactttgtgatcgtgcccgctgtctctagctcttcagtcactgaatcagaaaatttagtgaaattcagtcactaaatccttcccagcttgagttatttctcttctttgacctcactggaacctaaagctccttgaatgccctacttttcctcaatcccttagctacaccctttcttcactttcttccccttcttccccatccagcctagatgtggcaatgcatggcttcatctatcactgtcagactcttcaacctccttaccccactgtcctcctatcacattctcctggaaaaactccactccagaaaaaattcacatcttaagagtttacacttgctgctgttggggaaaatcatatatttctatacagtggtgctttcacaaattcatgatctctcacctcacccagacctaccaaaaaaagtgacagtcctctgtccctgtttttctattcctcccattctctatagcggctatttccaattttctccattccacacaagcctttactgtgtctttcttactcaagaggattattggcatttttcctttggcaaactctttctaggtttcagctcaaaaattattttctcttctggacatggtgagaaaccctagcttataatcctagcactttcggaggttgaagtaggaagattgcttgagcctaggagctcgaaaccagcctgatcaacatggcaaaaccctgtccctactaaaaatacatacacacatacaaaaaaacaaattagctgggcatagtggcacatgactgtaatcccagctacttgggaggcttaggcaggagaatcatttgaaccagggaggtggaggttgcagtgagccaagatcgtgccaccacactccagactgggtgacagtgggactctgtctcaaaaaaaaataataaattaataaaataataaattatcttttcatagttgactatatttctcaattttaacacataccacatatttattttattgagacaaggtctcactctgtcacccaggctggagtgcagtgtggtgatcatggctcactgcagcctcgacctccctgcctcaagcaatcctcccacctcagcctcccgagtagctggggcaacagacctacaccacacacctgactattttttaaatttgcttgtatacttggtggtctgcttacattacccaggctgatcttgaactcctgggctcaagcagtcctcctgcctcagcctctcaaagttctgggattacagccgtgagccaccatgcccagtcccacgtgtttttattacctgtttaactttaccattatcagtaagtttcctgaggtcagacaacatgtattgtacctccagcaactacacattttagtagatgcccaataaatatttgttgagaaaacagatgaataaataaattaatgaatgaagaaaacataagtataccatcatacgagagctctcataactttttgccaccaaagctgtgagtcccgcttcccttccaccttcaatcctcttaaagaaaagctattccacccaaagctagatcttctagcaatgctatggactttgttcacacctatcttctcagtaacgccatttgataatttttcttgtctttcctatgccttcagtctctcactttctatttcccttcagcaatggaacgtgatcaaatctatttcatatttaaaatcattgatttcttgtccaaattctgttctgtctcttccctgtgatagccacaaagaattcctaggcattatttatacttgttgtcgcttctttttcattctgcatttagtccttcctcagagtgcctggcctctgtcctgccactccactgaaaatgggagatctcaccaagatgaccactggctctgctcttgttctttccaagggggaactttgcacttgacccacctgacctcctcaagtcactcagcacctatctccttgcttctgcaaaccttagttcccggattctctgggcctatctccctgtctttcatggtgttctttgggattctacttcctctgacagtaacagcagtattggtgtcccccaggcgttgcttgttgagtccatcatgctccaaggttccagtgccagctatatgctgatgactccctcatcgatggctccagcttagtctctcccaaccctcagtcattgttttcttgatgtttccatgtaaagatctacagacctctcaaattcagtgggcctaaactgacagtatgatcttttcctcaagctcagtttccatatagtagtggtcccttgccaagaggataaaaccagagaccttggtatcaccccaagtcctccattttgacttcccaaatctgtctgaaaactaaacatttctttccatccccatcactccttggataactcaagctgcctgatctctcattgggattattatggcaacccctaactggccttcccacctcaggctggccctgatccaattcattctccatgctgcagctagaaagagcctttgaaatggaaatatgattctatccttacactttttagaagtttccattggcattctcattatatttgggataaaatctcacctttatagcttggttttgggtgccctaagccttccatcatctgatgtcttacatgtttcatttctaccctcgaatcttcacctattcactctgtacctctccacatactcctgataacccacattcaactctggcaatacagactctttcctgtttctctccatgttctctcttgcatctagacctttgcacatgctgtttcctctgcctggtctgtattagacatgcatgctttctgagcccacaagggcatgaaacactagaaagagcacaagatttggaaccagagactcagcttagcagcttatttttcatctctctgtcattcattgttccatccaacagatattggactgagcagtcttctcttcctcccttcctccaaaacacactttgcctggtatctcctgcccatcttcatgctgcactttagacatcaaccacccagaatagctttctttaacacacacacatacacatttataaatctgtcttttttgatattgcattgtaccctgaaattctctatcagagcaatttctttcagtcagcaaatatgtgttggatgcctttctttgtagaaggcattgtgttgggcactgtttacttgtctatgtcaccaacagggtggcatgcttcctgagggctgtgacagtgactatttcacaatttcatatgccagtaactagtactactcttgggttagggtagattctcaaaaatattgtagattctcaaaatatatgtatttatgttgttaaaagaaaaactttagctgaattaaatttcagagtttaattgagcaaagagccaattaaatccggtagtttcctgagccagagtaggctccaagactccagcgcagctacgtggtgaagacttatgggcagaaaaaggaaagtgatgaacagaaaacggaagtgagatacagaaaccgccggtttggttacagctcagcgtttgccttatgtaaacatggtttaaacagttggccacctttgattggccaaaaacccagtgattggcacaagagtaggctacagtctctttacagttttatctaggttatagttcacaatgcacagagaaatctttaggctgaacttaaaatatataaggaggcagctttaggctaaacttgattatttaacaatgtattgatttgctggctggatggatagaaaggtggaaagataagttggcaagctggatttctggttccatgtcttgtgctcttcctagggcaccttgctcttgtgggctcagaaactatgtgttcctatgacagaccttcagatacccctcagggagcacttgctgtcctccatgggtgcagcacttcctgtctgtggctactcgggtgtctctctctcatttttccctgccagactctcaacccttaaagattttagtccttctctttaggaagaccaaaaatgaatgagagtggcatggatttgaaggatgagatgactgaaaggaagagctgactgatttgtttagattgagtagtgcattgaggacactggtccccaggtgttggtaaatagaagccccttaagcagaggagcagcaggcttttcctcctctttcattatggtgatgattattatttttgtggttcccatggaaacaaccagagagagagaacaaaaatgtcagggaggttagaatgatgagatggcccccatatgcttaagaagactatgtgagtccatgtgtgcatcagtgtgtatgtgtgtgtgtgtgtgcactgcctgcacgttctgctccagcacactgctgggtcaggagaagttgtgatgcttattcatggcatttgttacagtcagtctcagcaaggagacaactctcagcttttagtggttagggagtctctgtagtgacagctccatcattgcagggagaggacaaacagagatggagacattcctcatgtgagccagaggagtgtcaaagaagaagacagctcaaaactggagttgccggcctgctcggcgctcccctctttttgtctgagagggctcactctgggcacctactttgtggctgcagtgggtacattgaaggcagctgtctgcagatctgaggatccttgagctcttcatctgctgctcacacttttacttctccccgcctttctgattctttgcctaatttgggagtgggaagaaaatccagcctagggctcttctcagaatggtcagccagagcattaacatcttgagcaccgagagagttgcaggagcccctccacaggaaccctttcatccactgtctccgccaaggctctgcagggactggcggctacctcttccgcatcatttgtggccaggatgttcaggaagcacaaggctgtaagtggtgtcttaaccacagaaggcatagagagaaacagacttgaaagccctgaactgagagggaattcattctgattgagaggagaacacagaagaccagaactaaagaagacattgggacaaaggcagctgctgtccatttcaggctgagttttctcttcagtagtcggcatgcatgtccaaaaagctcaggactccatcccccagccatccttgtgtctaggcgtggttgtcacccacatggttatgtgtgctacttccagactttccaccagctgtgtatcatcatgcagcgtgatcctagaagacacgtattagaaagggaggaaactccattaacctggggtgcttcaaaactgcccagagcagatttggctctggccgtagccctgcctaatgaccaggaacacccacactgtactctacctgggccaaaaagactcttctcgtgtgtcagctgcggacactttggagttgattagttccagtactgactactgccctaactgctgcagcatcccgctgtgggaggaagcaggatgtcatttctatcccaacccctctgcccccaggccccatgatctgccacagctcctctctgacagagtgcagtcaagcctcagtgacagattctgtctcctaggccactcttcttttccttcaacaccattccattgactttctctccccatactttttagtcttttttccccccttgaatgattttcttctttatctttctgaccagcgacctttgattgcaaggagcaactcagtttcacattactagagtaacagagtgtgttgtaattggccgggcattggtcttgaaatgtcagggaaagatttatttcctagtgcaacctctctgggtgctaattttgctataggctgcaggataatggttcccgctcacaatgggcgagagttcctaatcagaatacagggctgtaattgggttgaagggattttaaatcattaaagttgcatttagaatggggaatagaaatagaaccccaagattgaatgactcacttagtatttaatgagggagccatggagtattacttataatattcgcctaatgatcttacaagcaatgtaactccccccgccctctagggcctattcacaaggcacaattctgcagtctcagacccaccactctggagcaattaattactgacccatcaaggagcaatcaggctccgctcggccagcagaagcgctgatttcttcccccagtgtctcctcactcttcatcttcctgcctgccttggtctagggcctgcggggaggggagtcgacatttacaagccataaatcatcatgcagtttttggaaaacccagctcactatgagaggaacagggtgaccaagggtacctgtggagagtctgagaggagaaggcatcagaaggaggctatgctggccctgggagtgtacagtctacaggtttcagaggatgttctctggtgctgcagacactaagtgtctagcacatagtaggcactaaataaattgcagcttcccatgatatgactatgaccaagggttactaacccagctgaatagatttgtttcaggtggcgtgaagctccagcagttattttggacttaatctctaggtagatctgtaagaccaatgttcctgtaaatggaattcctgagaatttaggttacagagaggctgcttaagacatatgtaccccttccttctgcaggttcagaaacagctcagctctctagagagagcacgcaagtgttgtgtgtgtggtggtcgtgtcattgctaatggtccttcctaaagggaacacacatttgggagtgtgattgacctggtcgagtggcactggaaccacagcaggtcactgatcctgagttagcctcacttggctgttggtgccacgtcggccaggatgctggggacactcagtctgtgttgcactggaggccaggatgctcctgggtgctgatggctcactgttctaaatctcatcagggaatgtcacttgtccgtcctgtgtcaggcctcagaaagacgacttccatctcttctagtatttcaagtaaaacaaagtctatgggtttctttggtgatacctcagttgtaacttctattgtgttgacataacaactgagatatcataatgagtaaataacactgatatgacctcctaggtcaggctggcctgggaaaaagctttctatttgagaatgtcttgaacatagagcctggaaggtagtagagacttcgtgaacactcgtgaacttctgatgaaagggcttctcctcaaatacttggatctgatagcttcatgcaggtcattgtgatgaggaccttttccataaaggagccagagggaaaagggttccggcattggttgagttcctcccacttgggcagatggtaggctgctcatcacactaaagtggactcatccgtgatgcccgttttgcaattgaggcaaactttacccttgggaataaactaaaatattctaccagttctgcttttgcccaattaaggcaaagaaagattcgtggcaagtattttgctgtaacaggtattgttatgaatatccattgatcctgctagaaataaatctgtcatgatgtggaaagttaaaacagctaggatattctttaattatgaggtgttgactgatttaaatttagtaactgttaaaatatcagtagttatatcattagtttaccaaaaattaaaagtgataatgcctgcttcatacaaatcagagccaaacagtgtaactttgtgcatgaaagaacatgctgtgcttgatgtaattagtatattcccccaaaattgtgactcatgataaatctaataatatcttaaatgcaaaaaaggtagtccaatattttaaagaatcccatagagaatcttttgtgtgaagagcctttggcgttgcggccatctccattaattcatctattctgaaacttctggggtctgtgcttttcctataaagaaggccacctctgtgcatgcttcatgggtggcagctgtctcctacccacgtgcttgaatgacgagactaatgctctagaccacgcacctcagttgcctgcagatagtgtccctgtcccgatctaatgccaatgtcttagctttgccttttcagtcttctatttcaactccaggcaagtctggctactagcccataaagtgccttttaagaagtgggagacttgcccccgtaggcaaatatagccccacaagtacaaggcgtggtgaacttgtagcatctctatgtgaattccgtcaggagatgtagccccaacctggggttgatagcttaacaagcaaatagtacctggacttcagcctcacatgcttccttggccaggcacccttgtgcagtgaacaacctgcacaacctgtatacagcagccctgcagcttggactgttttgatcacaaccagagcaatgtccaaataatctgccaaatatttgtgcaaacattatgttcatgtttaatcgggagcgatagttttgtcttctttataaaaggagcaaatccccagaagctggtcaggagcaccagctgtttactgcctgcagaagccgctgcttatctccttgtaaccacctgcctcttagagatcatgtcttaattaactcagtgttatcaaaactgaaattgtagcaacacctgtaacatcaaattgtaaatgagagataaagggggaaaaactctgctgaccaagaaagggagcttggaaactctctcttgagctgtaggtagttggctccaggttgattggtggcagtctgctgagaattagaatcagagactcatacattattccatttggaaagtgtcttggaggtcttctaatccagtggtggtcaaatattttttatctcatgacacacaacttattcttctgatgttcaatatatgctgatattttctattttatcttatttatttcattttaaaaactcacggataaaaatcattccattgatttcatgacccactacagattcacaacacaaaaaaactggaaaacagtgatgtagtctaatttctaaaatctaaaggactgagggacaaagaggtgaagtgacttgccccgggtaggttatcagtgggtattgttcttaaacccaggtctatagactccctcccagtggttctgttccctgaaatctactaaattctgccactgcaggacagctccgagaagaaaagcaagtcttaacttaagaaacaggtcttcttgggaccctgctactttccggataacaagcctgagtacctacataatacaaaatgtaccctttgaggagaaggtcaggtgctttctcacataaaaagcattgtaacaactggtggtttgaacgcctcactgcattcccatgctgaaacagtaggggcgccatgcctcctagtcttggtgagcctccttaaaaccttaacaccctgtgctctaccccatccttttcttcctctttcatttccttcccccactttgcaccattgagatccctttctactcaccaccccctaaacttctcctttgagacactggactaaaatcgtgaacaaaataggcattctcacagaaacagtaattccaaattaaaacaaaaacaaaagcagtaacttattacactatgagagacctttttacatttctctgcctatatttgcatgtttttaacatattgaaagaagttttccaaatgaaagctgtctgattggtaaccacacccatgtgtcccatggcagtcactcgtgggagcaatcttgggatctaaacagagtttgtttagtatctttgtgtggtattgatcagcatcattgataaagtatgcactggatgttgttttcccagatcagggattgatttggaagatggttagccagcaccactatgatctgactgtgggcaggcggatcatcacactggggggacacataggcccaaagaggatccagcagattgaatttgcattatgcaagccccctttgagtttcacccactagcacatgcttctgtgacagttgaattaccagctatagaactggggtggcaggaagcaggccatctccattagcttcttttgaatccatttcttcatttcctttggccctgggcatgtgggcacaaacttactcgaatggccatattcacagaagcacaactttctacagcaaggtattatcagctgttgctgtcttcggaaaggctttattgtctcctagctaagggaatccctcctttccttccagggttcactaccagcgccccacccccacgcatacatatacagacactgagctgtgttttgatatgtgaggtgggctatcagctgtgatttaatgacgagtatcactgtcagactttacaaaatggaatttcatcagatggtgagggaagacttctgcatagaaactacagagggaaatttgacagctttttccattcagttatcaaagcatttgcagttcaaagcaggtgaaacaataatgtaatcttagcactgaatgctcatttgtatctgagtgtttcaataaataaaatggtcagggaaatgaaagcagacctgttgtctccaatccactaaatttaatatccagggtattgactgacagctttttatcaccataattagtatggattgttcctgaggccattgatcaatctttcctacctctatggacttgagtggctgttttcttcctctcctgccctccccaccctttattttaatattgatcgtgccagttgtgttccaccgcagagaggctgctcacttaggcaaaagaaaactcaggatgaagagagatggctgagcagcagccatttctaggtggcatccacctgtgacatcactctacctcatctatgttgaccttgtaacttgacctcttggtaccagtgaccttcagctcctcaatacgataaccaggcacaccgtcttccccactgggtggaagttacacaaagactagctacagaagccgtggtcaggaaatatctgttgaattcatgaataccccttctgtaatgttgtcaagctaaataagggagtttggatagaccaaggaacacaaccttgtgtgtgtgtgtgtgtgtgtgtgtgtgtatgtttgaatgtatgtgaatatctatgatgtaacctgttccatataatgcaggccagaaacctaagaccttcttatttctcaccgagctcttccaatttgatgttgtcctcttctcagtctgtctatcactaggcgtatacggtgtgtaggtatacacctcactatctcttgccttaactgttgccataattcactatctcatttccctgcctcctgtcctgcctcacctaactccaaccttgcatcttcaaatcttccacacagaggacaggcaggtttttgtaaaatataaactattatagtccttgactgtttcacatctaagatccttgtcatggcacaaaaagctttctgtaacctgatctctcctccctacttctcagccccatttcccaccattcctacaggtcacactgctggaaggtagaattgcaatggatccgttcagtcattgcctgcttcacgcctctaagtcttggcttatgttctgtattttgcctgcagtagccttcacattctttttctccttggccactctttctcattcttcaggaattcattcagatggtatccctttcaggaaacattactttagctcccaaagtatccgaactatgactttttctgtcttctgagattttaatagaatatatacatatacttttttatgcatctctatcctatactagagaataaacctgaaggggacaggggctacgtggtttttcgttctgtctccaatgcaaggcacaactcctggctcctaggatgtgtttcttgcactggaaagaagtattcctaagaagagagtcagtgtgcctgaagagctggggcatacattatgtcaaactggatctgtcttgggacacacaacgtgctgtgccatataactgcaccacgaacaaaagcgaggtggatctcacttattctcagggtggtgagaagagatgggaaaatatcccttcttcttataagcaggtagcaaggtatctttctgaccttaaagaattcaggtgttgtcaactggttattttccacagtgtggaagagttttgctatctatacactggagtagttttctcattggtcttcctaatggaatttccctctgccccactttgtagtacagatcacccatttgcataacttttcggaaggatgcttcctgaggggagagatgccatgcatttctgggagtgccccatgagcccacactgaccttagacagcccccttgctcccaatctgcaagctgtgtggagcctgtcttccctgttcctggcacagcagcctgccccaacagttacaggtgctcgcacacatcaaatgcctcttgttgaggcattaaaccaagtgcaacttttccgaactgagcacaacagagccaaattggactggaaaggccacaggttcctcagggcctcagggagcctgtggcatctacattgcaaattggccccatagaaaagcaactgatgccagggccggccttcatttcatccctaccatgcctattgtggaaccgcaggggcagatgtttctggaggtgaccgcctgggcgcacacaggcgcaggcagcacctcctcctcaccggcctctctccaggcttatgtaagacagattggacagactgataccaattggcacatcgtccctgccagattggaatcaggcccttctaccatctttggggtccacggtggctccaaataaaatgtacagaaggaatgtgattcttagctacagccaattttccctttgctattgcgctggcatttctaatctcgggcattttgttgctgtggagcacaccactacaaatacagtctccagcttaggaacgttgagatttgcaatcatgtgaaaatgccttttcgtattcctacagtttgtctggataatttatttattttaatgtattatttagtgcaaaactattaagtgagcttcaggttatattgttacgttgttgctaattcagttacatatggctggggcaggtgacaacaaggagggaagatacctatggcacctgctctttcctttcctgagatttctgcagcttctgcatgtagatacttaaccctaaaagggaaggtagtgtgcatattttgcctcctggattcgtgtctcaactgtaccactgagtggctgtgaatttagtcaagacacttaattcttccgagacttaatttccttacctctaaaggtcttcccaggctggagggttaaatgacgtggtgcagatgaaaatgcagagcaaggagcctgacacacaacagagggtgggcaaatgcctgtcctctcccttgctgtcccttcaagtggccttcatcagcagacctaggcatagcacctctgaacttcaaatagtctattagtagcaggaccacatttgaagttatgcgtatggtatacaccaacttgtatgtgtgttgtttaggaaggtcattctacagagtatatctgatgcagaccgggactgtgtttttcgttgttgttgttctattcccagttgtgcaaggcacaactcctggcacctaggatgtgtttgttgcactagaaagaagtaatcctaagaagagaatctgtgtgccttaagagctggggcatctttatgtcaaagtggatctgttatggtgcatgcaacaggctgtgccgcatgaggctatgtaccaaaatatttacagtagaaatttttgagtgatgagattataggataatttccctccttccttccttcctccccttcctccctccattttcccccgtcccatcttctttccttgcatccttcctgttcatgtatttttttcgtaaagtttatatcttataaagtagtaaaagatacaaaaataccctagctctttaaaaattgatttcagccaggtgcagtgactcacatctctaattccagcactttgggaggccaaggcaggaggattgcttgagcccaggattccgagaccagcctgggaaacatagtgggacccccccccaccaaaaataataataactaatagtaataatcataataataataatgggtgtggtagtgcatgcttttagtcccagctactcaggaggacaaagagggaggattgtatgagaccggcctgggcaacatagtgggaccccatttctacaaaaagaaaagaaaaaaaataaattatctgagcatggtggtacatgcctgtagttccagctacctaggaggctgaggcaggaagatcacttgagcctgagaggtcaaggctgcagtgagctgtgattgtggcactgtaattactgtaattactccagcctgagtaacacagggagatcctctctctctctccatatatacatatgtatatatatatatatatatatatatatatatatatatatatatatatatatatatttcatgggaagccaaatgaggagggcaacatttgagtcaaacaaggaagcccatctctgatgagctttcacaatgtcctccttctttcaccgtgaggagacctcaggttcactgtgtcagctcaccctatctgacccacatccccatcactttcctcccagtgggtggaaggattcacccaaagctccaacacgcacagctgaaggagcacgagttgagacctgaagtctgaacatggcttaagatggaacgccgtttcctgaaaccatgccccgtatctccagatgaataaacttggaacatagaaaattcccaagggtgtggaacactggtaggttcagaataaataaatatgtctgcttattaatatagtagtactgttagctcagaaaactgtagaaaagagagctattaaaattcaatgattgggagagaaacatgagaagagaaatcaaaagaaagggaagaggagcatagtaaagaggcccattaggaagtggagaaagaaagaagaggtgggagaaaggaaccagaggaagaccacggtaagcaggaggaatggagaaaacagtgggaagagacaaaaccccagcaggcagcagagaagcgttgatcctgtttccagggtcagtatgagacttaggcactgcagcagccagaccacgtgactaattgtccttaattgtcatgagttgactctccaggctgggggtcccaggcacttttctcagattggttggctgacactgcaggcttctgtcatcatgcagccttgctgtctgcttcatgctggcagacattggcttgaggtccaccttcactctaaccatcttctccgttttaacctaaagattgtttccatatcgagaaagaggggatgttctagatggcacctgtgcatgtgtgggagggaggcagagatagagaaccttgtaactccctccaccagcctgccaagtccctgctgtaatcccaggcccagctcagcaagggaagcttaaacctaagtcaatttgagggtggcctgggatcatgggctccgtggcaaccagggtggatattggtctgtaataagtcagtgaaatagtgaggttcaattacttacatgttccctgaagctgaaacaattgccattatcccacataatattgcttgacctacatttttacttgaaagccttcagctaacaattagtttgaatgttgagttataaatgaacacattcatattccagaaatgaaaagggaaaggggagtgataccaacacggctccctctcttcccgccctctctttcctttgccttttgtatgatatttcaacttagcttttccaagatggaagtcattggagagtttgtctaaagggggaccattcagaggtaatgagacaactgggctttatctgggaaaggggcagcttggtcggtgccaaggagatttgagccatctggattaaaatggtcaaactctccgcaggaagcaattaagcagctccatgtggagaagccacgtgaccacgccaaaggagctgccaagaacaggagattagtaaacaaagtacccagcaggaggtgtccaggttggtcactgctctggccacttggcatttgcacagcttcctctgtctttggcatcccatctgtctgtacccacagcctacctataagctatctgcagagtttaaacaaactcaggcagaactgagtttatttaaaatgttaaaagtccagggctcgggtgatcgtgatgatacatcttagactcacacagcatcccttcccaggtgttctggcaatgcctcggatgtctttgatgactcttcgctgcctgtgaaaagcccagaggtgtactgccattgagctgcgatgtttaattccctgagcgtgatcatttagccatagatagtcacaactgggttaggaagcatgtacctagattattttagtgattattttagtgccggtctttgtgaaagcttgagaaaaagctgagttctcctttcactctaagaatctttttgtttaaaaaaaaatccataaaaggcatgtaaaactcccagacatatgccttttttcattcagtgtacatttattagccaggcactgtattagcccttgtggttagaatagagacccgttctcatggatgttacccctggccaaaagaaagacgcagaggcattgggactgtcagctactccctacatagagtcctcttctgatttccagtcaagtcagtttcacacaacacaaaactaacttttctcaaggatttgtaacatcttgaagttttcatgtgacctgcaatgggctaatgtagaatggtagttcaagtaaaagatttatcctttttttttttttttttttttttttttttgagacagggtttcagtctgttgcctaggctggagtacagtggtatggtcagaacccactgcagcctcaactccccaagctcaagagatcctccctcctcagcctcctgagtagctagaagtagaggtgcaccactatgcctggctaatctttttttttcctttatttaaaaaaattttttttgtaaagacagtgtttcactttgttacccaggctggtctcaaactcctagggtcaagtgatccccctgccttggtctccaaaagtgctcagattactgacatgagccactgtgcctgacttttactttttttgaatgagttaacggcagcttactgtgcagcaatgtatcatgggaacaatctatgatatgttctcattgttcctaatgttcttgacttccatgacacataactccctagttttctttgtccagcttttctaagctctgcatggtgcactacaccatcttgaatgttgtcatgctaaagacttcatcctatgtcttctgtaccctgtctgcatgtacacacctggaatctctttcataaattgatatctttgctccaacatctccactgagttcctgacttataggtatagtgatctgatagaaagtcccacacaaacatataatgatcattttgttttactcaaaccttgttaatgatgcctactccttctcaataaaggacaccaccttccacgttgttgctcacaccaaaatgccgcatacaaactttatccctcctttatctttcctccccatctcgtaatatccattgtttctaatcgattcacacattttgttgagtgaacttccaaaatatatccccacttcatacctttacctctatttcaacaggctttagtttaatccgctgtcatcaaaacgacaatagctgcatgagcctcctagctgacctctttgttatcttgactttcccttgatactctgttctccaaaagaaaggcaaaaacatatttttaaggaatgaaatagtgccatttgtagcaacctggatggaattggaggccattattttaagtgaagtaactcaggagcggaaaaacagacatcatatgttctcactcataagtgggagctaaactctgaggacgcaaaggcataagaatgatacaatggactctggggacttgggaggaagggtggcggggcgaggaacaaaagactacacattgcatgcagtgtacactgttcgggtgattggtgcaccaaaatctcagaaatcaccactaaagaacgtatccatgaaaccgaatgtcacctgtccccgaaaaacctattgaaataaaaaatttaaaaaaaattcaaatatttttattattattatactttaagttctggggtacatatgcaggatgtgcaggttttttacataggtatacatgtgccattgtggtttgctgcacccatcaactcatcatctacgttagatatttctcctaatgccatccttacccccactcaccagcccctgacaggccccagtgtgtgatgttcccctccttgtgtccatgtgttctcattgttcaactcccacttatgagtgagaacatgcagtgtttggttttctgttcttctgttagtttgctgagaatgatggtttccagcttcatccatatttctccaaaggacatgaactcatccttttttatggctgcatagtgttccatggtgaatatgtgccacattttctttatccagtctatcattgatgggtatttgggttagttccaagtctttgctattgtgaacagtgctgcaataaacatacgtgtgcatgtgtctttatagtagaatgatttatcttttagttatatacccagtaatgggattgctgggtcaaatggtatttctagttctagatccttgaggaattgccacactgtcttccacaatcaatgaactaatttacactcccaccaacagtgtaaaagcattcccatttctctacatcctctccctcaccccttccaccatgtgaggacacagcgagaatgtgccatccataaaccgggcagtggggcccaaccagaccctgaatctgccagcaccttaatcttggatgtcctagcctccaggacaatgataaataaatttctgttgtttataaggaaaaaaattaaatatttttaaaacatgaatcttctattatattgctcccctgcttagaacctttcatacttaaaatccagtctacttatcaaggtgtcaagacctacacgagttagcccctactttcccctcacctccatgtccactgtgtcccactgggcctcttggccagccatgctgctctcctctcggctccgggacgccacattttctcctctctcagcacactgagtgtgcacagcattgtgtactgtacccaatgtgtagtcttttatccctcacctccctcccactctttcttccaaatcccaaagtccattgtatcattcttgtgcctttggcatcctcatagcttagttcccacttatgagtgaggacataagatgtttgggtttccattcctgacttacaatttgcctggttctcccctcttctgtcccccagtcctccacctgacaggctcctgcttaccatttgggtttcaggacaaatgttacctcctcaaaatggacttccttaaagacataacaacctttcacttgggctcaactctagcccaatgccctgtgtgttgtcttcggagaacttactgctctctgcaataaacttgcatcttttttcttcctgtttctcttctgagtagtgcataggctccaggaggggagggcctatgccctgtcttttgtgtgctataccccagtggctagaactttgcttggtgcagatttgatgctcaaaaagtatttgctgaacaaatgaatgaatgattacataagtgaataatgcactcttctttccataattttggttttcctggcaccaaaacacttaggaaataatatggtcttcaaagtttctgcatgtcttatctctgccaaggacagttgcctctccggagaactgaattgtcgacatatggctgaagtgtgatccagtggactggaggtatgcactgagtatattcctaatatcacgttgccctgtggcatggggcttaatgcctttccatttttggctgaagggcttcactgcaaatgctttcaatcatatccatgtttggttgaaattttatggcaaaagataacttagagacaaggatttttatttgaaaattacattaaaatatactgttatttctaaatatatgttcaaaatttcaatgaatcaacacagagtttttattgaacttctctattcacatagcatatgaattctcactttctgtcacaagagaagtaaaacttaggccaagcatggtggctgatgcctgtaattccaacactttgtgaggctgaggtgggaggatcacttgagctcagatgttcgagaccagcctgggcaacatagagagacctcatctctactaaaaataaaatttaaaaaattttaaaaaatatttttataataaaaataaaaggcatggtgatgtgtgcacctgcagtcccagctactttagagtctaaggcaagaggattgaaaccaggaggtcagagctacaatgagccatgattgtgccactgcacacaagcctgggtgacacagcaaggccctatctcaaaaaaaaaaaaaaaaaaaaaaaaaaaaaaaaaaaaaaaaaaaaaaagagacagagagaaagaaaactatggtccaaagtttaatccctgtttaaaacagaacgggctagtctccttggtagcaatgcatgtggcaggaagtccccagaaatttatgtgcatgcctatgtgtgtgtacgtttgtgttgtgtgtgtatttatatatgtgcacatatataaatatatgtattttttatatatacatatatattttttcttgattccttgactttttaatctcctttctctctatgtttaaaagttttagaaaacaaaaacaaaacaagccttccagtcaaaaaattttcagcacaagataagtgaacagaagggatctatcatcctgaactgtttttcataagccttcatacagctttaatgcaacacagaggtttggacacaagggtaagcatcaggcatcgaggagctcaaattccaattcgtgatgctgcagtcctctgcagtcctaagcaagccagtatggctgctcagtgtcacagtatgccctgtgtaagatagggattgttttaggaagatcagtgaaagtttaagaactgacctcctgaaaacagttgtagattcctcagacatcaaagtcagctaaagaaaaataagtgctaggcttcagattcatcgcaccaaatgacttcctatctaaattctacaataggtaaaatagaatacgtttcttctaaccaatcaacaccacttggaagctggatctgtctccataatcctggttagtaataaagatgcttcaccactagtttgaattttctggcgaggttgtcagtgattcgtgcttgaggcagaaggaaaccagtttgattctcgcataggcgtttggcaaaggaagagagaaactttgcttttctcaacagaggctagaaatgactcagactacaaatagctgctctgccatacaacaaaaggtcatccctccctctcatttttcctttcccatttgtcctgaatgaaggccaagctatatttccccatctctctcttctcatctcaaaatgcatagccttctttatgtggtgcattctagttcggattggtgtgtgacccaggctaagacagtgttatgcagattggagcatcttaaacagaccacaattgaatcagtcttgccaccatttgtcctgtccactataaggcattgaatggtaaatgaaagaaactagtgtcttttattcagcctagttctcttcttgcacacatgtttcacagaagggtacagctcaactcttaggggaaaaatttctaaggaagaaagaaaaaaatgaagaaagacattttcagaaaccattcccttagtaaataatgagaagtcttagagaatctcttgtgtttctctgatttgatagagaatgatgtttcagctttggtatgggaatgactggtggagtcaacagcaagaaaacgagactcccagtgggagggtgtgtactgccaagtactatgtaggcaacactgaatgcagccaagaggcggccttccactagagaaggcatcccgctctctaatcatgacgtccccccgggctctcagagggcaaaacttggaccgaatgctgttttggtctaacacacattttctgggactgcacacttacacacacacacacacacacacacacacacacacacacacattacatggcaagtcttctggattagcaggagaggctgctgatcaaatgcacccctgggcttctattcagattagctttgaatgaaaacaacaccaactctgttttcttattttaaagatcacagagataatcttccttggtcacagttggggaaacagccagagggggtcttgttacctccagaaaagccgtggaagatatctgaattcctgctgggcctattggaccatcttttatgtttttagacagaaagaatctaccccagtgagattctgaaagcagctcctcccagtcatcctctcctaggtattgtttatagctgggcccgtccctcaaagtgtttatttttccgtacatgcatacatcatgcacactacctgattgctttgatcaggttaaggatgggagcaggctctacttgcgagtcttgtggcacttccatgcagcccgtgcccagtctcagcgaggcacttctcctgggtggttggtaagatattcaactagagacttgcttcttaaataatgttggaatcatatccacggttgtaatgaacgcctctgtgatttgcatttaaatagtattttcatccagagatcacaaagaggaaagctatcttaacatcctgactctaattctctgtatctgaaagccagtctgtgtgcaccacgtacacattttccctctaggtctctttcagatctgtgtaccctactgatcaaaacaagcgtttgcttgcattaggatggaagaccccgacagctctggcatgcactggattctctcgccgcacccgcttcatcaacctggatccccatgagctctgattgaaatgcctccaccactggctgggatgtgagaggcactcccagatggtgtgctcagtgccaggcagttaacacaatcatttcttgggttgtcaatgaagccaattggatctggaaatgattgagaggcagtaaatatagacccccaaagtcaccttagcagtctctttccagagtacagttgtgcttcgaaggactccatgcaatcctaaggctcactttccaagccctgggaggactagagagacaaagggctggctgggctcagagacaggaaagggcacagaagtcaacatcaggccctagctttcagccccactgatggctgctccatgctgattcctcagtttacccatgctgcggctctttccacctgactccaggctttttgtttcttttcatgtcattcttcatcatcttgtggaaggatgttttttcatattgtacagttgaacttatttcatcatcaacaaatttttctctttcccatggattctttaaaaggcgtcttttgaagatttatttctattcggatgcaagcttttgtttaaaaaaataaaagagatgtaaatatggaatgttattgaaaagatcttatcttgcttttgacatgacatctaaaaatgtgtttaaaataaagagcaagtgttgttcaaggcatgtatcaaggcagttggcttcctgcagtgagagctgggtagtacttcgaacacttttctgcccctatgaaagcctctcacaggttaggcccctgcgacccagtgtcctcctccttaaatgtccctttctgatcagccacgagagggcaatgcagggcacttggttggctgccttggttggattgcagttggcaagttactttcagtgagggaagctactcagactatgacagtaattatatcagtctcataaaaaccctgctctccccaacttgctgctgccctttttcctttgctgcctgccttccttcctttcccatacccctggccattggctttgtatttgcagataactcactcatgatcctataaggcagagaagagtatgtgaaattaatgtttgcattttaaactccgaactagaataataggttgtttctagggggaaggatcttggagatcatcaagtttagcctctttaagatgaggaaacctaaattgggaaaggtggcctgactggttccaggtcacacagtatcacgggtaggctccaggggcatagacattctacaaatgcctacattttctttatccagtcatctgttgttggacagttaggttgcttccatatcttagctattgtgactaatgctgcagtgaacatgggagtgaggacaatcctttgggatagtgatttcattttctttggatatatacccacaagtgggattgctagatcccatggtaacattttcggcaacatggatgaatggggagggcttcaggctaagtgaaataagtcagacgtagaaagacaaacactgcatgatctcacttatatgttgatctagaaaaatccaactcataaaagcagagtagactagtggttgcctagggtgggtggagtgggagagaatggggagatgctggtgaacgggtacaaagtttcagttacgtagggtaattctggagatctaacgaacagcttggtgactgcagttaacagtactggatagtatacttgaagtatattgagagtggatcttaagtatcctcaccacaaaggaaagaaaagaaaaagaaaatggtgaggaggcgaggtgatagacatgttaattagcctggttgcagtgatcatttcacaatgtatatgaatgggaaaacatgagattgcacaacttaaatatatacaagttttatttgtcaattattccccaagaaagctgaagaaaagaaatacaataagattagggccgaaaacaaaggaaaggtagacataggtaacattttcctgtcaggaacacacaaacttccagaggaatttgggaaagaggagatgactctgtgggaggaggctcagccgtagtctggatggtgatgctctgttctacgcacagtagcctcggtattcagccagggacccaggagctattgaataagccatgactcagtgtttctgtgaccacttgcccttgtctttctaatgtttgcttaatttacaaaatgatgatgttgcgttcctctcccttcattgattatcactcaaaccttgtaggagcctttacctgcaaatcattcacacactatgtggcaagggctggtgagccctgctctttcatcagctctcaacctgggaagatcctttctctattggggcaaataagcaaaacaacctaaaaatgcctttacacaggctcatcctcctccttgtaatgctctttgccccattcatccattggttgactgctatagcttcttctaaactcagctcaggtgtggccttctctgcgtctctctgagcatttctcctttctcccagttccctggattaggcaccgtatcagtcagaaaccactctaggtataacagtagttggacttggttgcacatgtgatgcaagggctgagaagcctaccaggagagggtgaggcaaccaagggagtaaacaatggtggacttgactaccctattcccacttccacacactccatagggctggagggacacagggtgagaaactgcttttaagtaggggccaggccaatccagcaagtgctaggaccatggaggtaggggctggagccactgggagacactgcccatagatagtacccaaacagaagtggggggtgatactttctcctactcttccattgaccaagacagtgctgaagccagagggagaggaagcctgggaattatagggaatgcagtttctggatacagagcaaggcagagaatgttgggaaatgaaggggacagatacatgagtgcccgcacctcttctctggactcttactgcatcttgtacttaaccaccctcatagtagtaactatagggtgtccttaacatcattcagagcaggagtgttccttctacctcaaggacctagcatagtgcccagcaccaggagatatggaaggaaggcatgcataggtttgggaaattgtgatatgccatggaaatgcaagtcatgattattaagatccagccaaaagcgtgagctctgctgaggatgacagttatagacctttcttcaccacatctaacagatggctcagcccctttccgtgatgctatcctcatttgcagacttgaaaactagtgtagttaattaaaataatatgagtgaatgaaatataggtgtagggaagaaagaacaattctgcaaggagcccaggtcgaagaaaagtaagggggaaactatccatcgaggacaacacagagcttcttatgctaatattttctcaagaggtgagactatttcctggcatcatttgatcaaggcagactctcatcagcccccaaagtcatagaagtccaaagttccagaatgactcacattcatttctaattctgcattggaaaatttctattagaaatcgtgagtgttcatttaaaatgattgtttttttgtattgcaactgctttctaccagtctagttaaccctctagcaatgcaaatgttgttcattcttgctacacgaagacaaagagagtgtttgccaatgtctccataagggaagggagcattgctttttgtttcttctctagttgattgagtttgaaaaggttagaaaagtgtgtcagtcttcagactggaaactctgagcatgggcccctctccctagtctgtgccccaccttgcttggcttcctggccatgtgatggacaataccaagctaagcttctgctgatggaaggagtgacaagtctttgctctcagaagtgaagggctgtgatttgacaaagggctttgaaatattcttatatataaagcattaatttcattaatgtaatcaatgctaaagaagcagaccaaccgggccctttgattcttcccaggctaaaatctgttgggctgatgtgatataccaaaaataaaatagtacccctctccatacttcctgttgtccacacaggaatttattggtctgcattggatttactctctgatgtatttgtttatttggggttttgtttgtgtaagttccatgagaacaggggcttagcacttaaaaaatactttactgctctgtttctgaatctaagaacaagcacacagtgggcgctgaataaatgagcattgtacagaataaaaagtaccccagacacctgtcctacttcagggcaacactgagctgttagttataggtatctgtccagttccttgtctgtgctcataccctcaagtacctaattcaaaactgaagaagaacttgggctgccttgggaccaatgactccgcgctaacttgaattaaatcaatcttgtcactcccatctgcctgcctccatgtcatagtagattaattgcaacataatataaaacacatttatattgcatcttcacaatagtttcagggtcctttacagtcttacaatctaattaagcggtagcttcaaacatgaatttctttagtattttaaaagcgtaagttgagcagataagcttttttttttaacttccctattctaaaactgaaagaccagctgattccaaagtccctgagtattattaattaccagtggctgcaatcaatgcacaaggcttgtctagaaagctatttcctccttaggtgaatggttgggaatacaatatatggtaatcaacaatttgagagggctgagcatggattgaggctgagaaaaagctgggacttggcattgcatctctcctgtgcagatggcagagaataaatcttgactttgcaaggaagataaagcaaggtggaggtgttttcatcgcaatcgcacagcacataaatggcagagagaagaaagaaacctcggaacacgggcttcctctccaaggacagctactgctgttttggagaaagcttatctgctcttatttcaccatgagagaacttctgtcctcaagagccacggaaagggtaccagaaatagatgagagcccaccaacaaaaggaatgatgaagtggccctttaaatataaatctctggcacccccaaactctctggatgttcccttacgtattcaaatgagatcgcagcgtcagattggtatgcattaggctggtttcaatgaaaattaacatgtaattgcttcaaatgaagtaagtgaggaggtaatctgttcttaaattggattcccgggattttgtggtaccataatgcagctgtgaaatgaaatatattttaaggatgatgtcctcaagggggtgaaggggctgggagggggaggagtagagatagatagtgtatagtagaagcgcctctccccccagcctgccacattctttctctgtctcattctccagtttccagcggatgaaaagatgttctctcatccatgggtggcccccatgctctgggccctgggacctgggcagacagtgccccacattggcatcagccggtctcctctacttcttactgtgtctggagcttattcccagaggctgtagctccccagggctgtagctctgtggtcaccctggacactggatttgtaaggagaaggtgctcgtcctgcaagtggtgtctactgagatcatcaatggctgaagggtgcactgctacagttgggcaaattttccaaagcacactgtgcagtaagaaaaaccatcactccttgtactcctggaatggggacatgtgcgcttgacatcatgactgacccttctgatatcaaagagtggagctggggtcgcagcagcaggaacagccaattccattaccaccaccggcctccacagcctgggttcagccagaccaggcacccctgccagcagtgatgatatggtctgtgaagtctgaagatgagcctgggaataattaaccttcttaccgttcaatcaggacgggaagcagctgggtgaggagtcagtgcaggttaatgcattaaattgtttgcctttgccatcctaggctgaaatgggattttcagtcacaatggaaataagctggcagtcttctggtcccgtggcatcacgcctctctgccaaagagccatatctgatgggctttggggaccttctgcaccaaggctacagaagggcagagctgttaaatgaaatgcaatcacctggcaatgcacaggcagtgctgggttagggttcacacagcagagcagtgccactggtctagaccgagtccccatcaagggctagcatgagaatggcatggctgccttgcatcagctcctggggagatgcagatttataacacgctatataaagagtatatgttctggtgtaaaaagcccccatcagagctagagagaagggaaattgacaaatctcagaagaatgcgattctgggcattctctattgcacgcgaatcaggacccccgtctgagccccccgcttgccttccctcccagtcacagcttggttctacagctcggctgatgattttttttttttagttcttgtctttgtttcctcctgtttatgttgctattttctttctgcacatgttgagcagctctggctttaaaactgatcagagctcatggctccttcaaatgtagacgttgtattgctacagtctctcaatatatgggaccaagatttttgagagaatgccagaatgtttctgctcttcccaggagttggtagacttagaaatttgaagaagagaaaagggaaaagaatgagagtgaggggtgacaaaactcagtttacccgactgagtttaggtctccctaaaaacagtggcctgagacactttagacccagctaatggcttttatttcctcctctaaggttgcaagagacagtgtctttgctgtgggcaaaagagggaccagactatgaccaatgattaaattttgaatcactccatataaagaataggacctcttttgaagaccaaatctgtaaaccacattggataaatcatctatgttgctggctcctttctttcttcatctggtagtaggcatagaatagtatttgcctccctgcttagggttctgcaaggattagtaggcgttaatatccacaggagtccccagagagagatatgccaatagcaagaaaagagagcttagcgtccttttctagattctccgtggatgtggaatctactgtacagtttatttgtcgtctgaaccccaaggtgcctcttggtagagtatgcataggctgctgcaagcttagctctgctggaagaggtgggatggaatgtattttgtggggagtgcgtgtgtgtgtatgtttgagagagagagagcacgtacactcgtgatttttccatgatctaatatcttgaattaatcattgtaatgcctttttctgctatcaaaatatgtccagtggtcaccttgatatgctcatctggtttaactctcctcaaagtttgcagtgttcacaggagaaaagtagaaggggccagcggtttcattcccattttagagatggggagggtttcaccgcaggagcctgaggatatgcaattcatcttaatcactaaagttgtctcaggcaatgacctctataagcccttcttccctggacctcatttgctttgaatatgaaatcagggtcagggtgttaatgtcctactcttaaaatgcaaactaacgtcaaggtctaagtataaaaagtaaaatataaaacaaaatgcataaagttgtaccgactgtagataccacagtataacagaaaatactgaaaaaaaatatgaatctcgtataagactcctggggtcaacagaggcgtgatgaaatgcaggagatgagggacaaatggaaaatgccccagctccatttatttaagtaaaaagactatgaagtacagaaaatatgagtgaaaagctggttcattataggatcctgttcccagctctattcttgccaatctccctttgacctaagaaatcctctcctgtttctctcttaaattctacctcagaacctttaattctcattttattttcctttcccatgagtcatttgtgtcctcacacagctctgtgtccctcgattccaatgggcagacccacccctctgttcctcccccctctctcgaaccagcctagactattttgccaatagttttcatgcataataacttaagtgcatcacttttctacaaacatgttatcattagagttcaattcttctgctcctagcctttgtgcctggtaaatatacttctttgacgagtgttttggaagatggctccattttatgcatgtgcattagtgccaattgcacaaagcagaaacacaaattacctgtattctgcagacagatctaatcacctagacaccatgggctggcattcattgcagcctccacctctatgcatgaaactgaaaggggagcacctaaactgcctattaatttgaaatgtaggcaaagtgctataggcgctgaattgcgtgtttaggaaagctgtagcaagccattgtgctaggagccgtgcactcggtgtgggcctttgctccgaatagacagggcttctctttgggaagatgtagggctggggcgctgggaccctgccaaagtgatctctgcctgagactggaagagaaatgagataaataaacaagggaggccaaagtggggtgtgccccctggataggacacttggaggggtagacgtggattttccccactatggtgttctgtaagattcttttccaactggttttatttcaacaactctgtagtcagcaaatcggcctcccctggggctgttaaagtcaaatccaggaggttttcataggaatgaatacttgtaacctaaactggggctgcgcctactgtcagagttcgtgagttttttaaggatgcctgaagatgtgcctcaactacctggcggggaggaaaagaagtcccctctgtaaatgagctgacacttgtctgataaaagtggtgcctttggtctgatcatctgaggacaaataagcagcagtgccacctcataaagggaaggggtacctcagagccccaggggtgtcctgagcaaagggagcactttccacaccagctgtatttgggaaatctctcagccagggactcacccctttctcccaaatctcctgagctccttagttggcgtttctttaaagatacttaagtttgccctgttcagaatttttctgggtttgtagcttgtcacagtggtgcccagaattagattcctgttgccttgtctcacacacactcacacacactcacacacacagactcactcattcatctaattggaaacaaaaagagcaagggagatggaaaacatggactctagttgttctccttcctcgccacgttgaatgtatttcctcatgctccccctggctggcctcctcctggcacacttttcctatcttctcttctgtgcatctccccgtcagccttgcttctctgcatctcactccccctttgcttctctctcttttctctcatctgcaatgaggctgctcaactgccagagggtcagaactgtgagggatcagcatgagggccacattgacaaggaaagctgtcatcaaattttacagcttcatgtaaaatgcactgtccatggcaaggacagagaagggactggaaaggcacagggggcagtgtggggagaaggggtagttagaagagaggctctctcgtaggtgaagggggaggtaaacctacgtgctttctacagaaaggtattcatggaggcaaatctgccatcttttctaaacacaaccatgtctctggaagcctcactaggagaccaacaattaataacagtgtcagttatggcatgtctgtgtggtccattgcatagaacgacagaggaagctgatccaagctttgagtaccaggaagccaagggtagcaatgtggatgggcctatggccgttctgttttcggcgagagctagggaaatcccctgccactggtccttcccatacacaatgctatatgcgcatttgatgagccagccaacaggtgcctgagtacctgccgtgagaccagctggcaatagctcctctgaggcacagcagaatggaccgtgtgctaaaggcatcaacagcctgggcaggcaaacaggaccagcccaggagagtccattagagaaccacgcatgtgccggttactgaccaagagttaggttcctacgtgtgcacagccttcccccagattccattccttaggactctgcacccatcccatcccactttctcaggacagaaaccacgaggcagagttgtaccttgccttagagtgtccgtctcctggagaccgtcagtaggatccagtgcctgctttgtaatttagtagctttgtgacccgaggcaatttattaagtttcagttcccttgcaggtaaagtggagatatttttgtttactaccacacagagtggccgtgtggctcacataacatgatctgagtaaagtgctttgcatagtgcctggcacactccagtgatcaataaacgttagtcagggtcattattgtgctatgccccttcctttctgctattgcccctcccatccccggatcttcgatcgggccatgggttctacttcccggtgtctcctgtctccatcccttcctgtccagcccctggggccctgccctccctgagatctcagcagccgtggctgggctggcttttggtggttttgtgagtgctctcagtctgcagggagagacaggctccaaaacacaggtcccagcacagtgccgccctgttggaagctcttggcacctgcgccttagattccttaacataacttaaaatgcccttcacgaaagtacttctcttcacctgtccaggtttgttgcccatctgcctccccatttctacccaaatcctactcagcagctgctcacaataatgattctcagttttgcacatcagaaaaagttgtggaaattgttctgaatattttttgtgtacgtgtgtgtgtgtgcgcgcgcacgcgcagggcggggttgcttgggtaatttataaagtacaggcatttatataaagctccacaatggctgagtgtggtgtctcatgcatgtaattccagcattttgggaggccaagtgaggaggattgcctgagtccaggagattgaaattgtcagcctcagcaacataacaagaccctgtctctacaaaaacaaaaaaacaacaacataaagaaaaatagctgctcctggtggtcctagcttctgtactcctaggtactgtagctagcgccagttgtctaagctactctggaggctggttggaggctgcaggggtgatgattgtgccactgcacttcagcctgggtgccagcatgacatccatctccaaatgaataagtaaagcaagttctacaggtgggcctgatttgcatcttgagttctagagcacaaccttcccagacacaccctgccttcctcacactgcccgcatatctgtctacactcagtcccagcaaacgcaaacggatgggctcacagtggggatgcaaacaaagatgaggcgactgagtgagtgaatcaggaaaggatgttttcattttattgagtgaattagactaagtcaaaccctcccttagagtgtaaagtagaagataaataatgtactggtgtgtgtttgtgtgtgtgtgtgtgtgtggtgtggtatgtggtatatgtggtgtgtggtgtggtatgtgattgtgtagtgtgtagtgtatgatgtgtgtgtggtggtgtatgtggtatgtggtatgtagtgtgtgctatgtgatgtatgtggtgtgtggtgaggtatgagtgtgtatgtggtgtgtagtgtgtggtgtgtgatgtgtctgtgatgcgtgtgtggtgtggtggtgtatgtggtgtgtgtggtgtgtagtgtgtgctatgtgatgtatgtggtgtgtggtggggtatgaatgtgtatgtggtgtgtagtgtgtggtgtgtgatgtgtgtggtgtttggtggtgtatgtggtatgtgtgtcatgtggtatgtggtgtgtgtgtcatgtgtagtgcgtagtggggtatgtggtgtgagtgtggtgtgtagtgtgtggtgtgtgatgtgtgtgtggtatgtggtgcgtgtattttgtgtgttgtggtatatggtgcatgtgtgttgtgtgttgtgtatctgtgtgtgctgtgtggtatgtgtggtgtgtggtgtgtgtgtggctgggtgtatgctgtggtatgtggtgtgtgctgtggtatgtggtgtgtgtgcgtgcatgtgtttgtatgtgtgtgtgtgtatattgtgtgtgtgtaagagagatcaacaggggtcccaggcaagggggatgagtgggctgttggcagaggaagaagcgcagcccagcaaaggtggagcctcgctttccataagcagcttgggtccccaggcgcccctgcgcgatgtgggagtgggagagactgagtgggcgcaagggtctcgccacctgggtgtgtgaacgagtgcagaaatacaaacagctccgagccagaggatccttagtccatcaattctttgcagaagaaaagtctgatggattgaaattgtcacacaagaacgctgtgaacaatagcagggagatactgtttctctccagcccagctgtggtgagttacttcttaatggcaaggtagggagacacacaccacggacaatgctgagggtgacaggagatgcctgtgccagttatttattatgggagaggaaggtgttccttctactttttttccttccatcacccccttcttttctgtgataagtgggggctgagctgtttgtgttatgcagaggctgacaaaatgaggcgatcagattggaaatcaaagctctcaccatggctggcagtgtgcggggacttcgcagccacctcccatggcgggggcaggaggagggggaggaagcagctgctgtcatttctcccctagcagttgtttttggttttacttttatttctcccaagaggagaggagctggagagggcagccaaactagcacaagaaagaaaaggagaaagagggcaagaatggaaatgcggaaggagaaagagccctaccaggaggcaaagggagagggaagcgagaaggagggaagaagcctccagaacgtgcctttttccgatttgtgctggctgcgaccttgcagcctgtttctctgccagctgcccctcctttgctgtgagaggtgttttctgtgacccgcaaagcgtggtttaatttacagggtgagttggaaatgattcaagcatctgctcctttcaaatgttgggaaactgaggcacagcacattaagaactatttaacttgcttctttcgggccttattgtcagtcttttttcttgagagttccagaaactatttccatctccagctttcaggatgaataacttattcaggcctttgcttttctggtgcgttctcccaaaactcctcctatttcaaactgccccccaaagtccctgagcctgagtcttatgggttgactctgccctctggtggatcgaaaggtggtgaatgaggcagaaaagggagctcgttccagaaaaacataccttggcaggcttcccaggaaagtctttggttaaagcaacccgaacccaaaatgaatacagctcaatatgctgtgatgtattaatatcctgataagcgagtcagaatgtgtttccaaatagacctattacataagtggcaataaatactaacccatctctcaccttgctgcggtgagcgcatagagagggatctgcagtgtgggattccaggcagtcttggcgatgctgaccttctgacggatggggaggcctgagccctctataacacaggtcccctgtgacatccacatcacacaatcgtgccctttgcccacctttttaatgactttctattttgttttacaaccagcaatctgctgcatgtgctggtcaacagtatctatcttttctgctgtggcttgctgcctcggatgcttttatgggcattgattccctccactgcttccccaaagaggttcttttccttgagccagagcggcattccggcggattacagtgtctgccactctgctctccgatttattgccatcctgggctttagtctccctacattcacagccaagcctcattcattttgttttctggggcgagcaaattgaagaagttgctattaataggagaaagagtgtcatgccggcagacttagtagtgtctaacgttatagcctgcaagtcccagagccaagctcttgtcttagatccacccttccccatccaagggactgaaccaggtgggatgctggcctgggcattggctctctgaaagatttacacttttctggcttttgtcgacaaaggatattctcatatttgggcactctcatccatatgtcctctccttttccctgtgaccatcagtttacatttggcagaaggctgtctggggttgtagatgaagtctgagggcagatggctggggacaggacgctggagaggagaagcacatggcagtggtataggatggtttgcttctcagctttcccagacactaaagtatatgaatccaattaaagttgttctgtgagtgtgtttttttttttacattgataaacatgtttgctaatcatttatcacaaattaaatagtagagcaatttctaaacaatgtcctacagataatgaatgtcttttgaatatgcatacacaatgttacatctcaactgttgctagtcctgtttactctctcagctgtagaatttagaggctgcctggggactgtagagagcaggacatcagatgttgcctctccagggaccatcctcagatctttgtggactggccccaggctgtccagatgtatatctccttcatgcagaaacaggagcctcaaagaatcttccagtgggttatagttgtgggtgtaggagttcacccaaccaacttaacttgccaggtgatcacacaggtacaagaggctgataaggggctgggcatggtggctcacacctgtaatcccagcactttgggaggctgaggcaggtggatcacgaggtcaggagatcaagaccatcctggctaacacggtgaaaccccgtctctactaaaaaaaaaataataaaaaataaaaaaataaaataaaattagccgagtgcggtggcgggcacctgtagtccccgctactcaggaggctgaggcaggagaatggcatgaatccgggaggcagagtttgcagtgagctgagattgcaccacttcactccagcctgggcgatagagcgagacaccatctcaaaaaaaaaaaaaaaaaaaaaaaaaaaaaagaggctggtaaggtcagaaatcactatcgacagtgtagaaatttttctttgggatgggttggtgtcacaagtcccagcaggttattgagtgaacaattctctttagaaagtgccgctggaaaagtgtagtttgcaaaagatgtgtgtttgtgtgtgtgtgttggtagggtggatagggtggggtctattggtcatatattctagaagaggaatttggaggtggctgtatagggacttggtatccaaaactgtttgcatttctggaagagcaatgttgtatagtgcatacagctgtgtacgtattgttactattgatgctctaagtgatagtttagaaccaacttaggggatagttttcctgtgtctcacacatatattgattcagagtctctggcactatcctcagtaaggtaacaaagggaagcaaacagatcccaggagccctgagttgaggtcttgctgttcccaatcagccgatgtatcagaactctgggtaacttgacccagtagcttaggccctgcattcccattctggctttgaagacaggagaaatgtattttaagacagaattcctaaagacagacctcaggtgggtttttcatgcctacctagaagtaaggttagcttcagttaatctacagcttcctgtgggctctacctcaaagtcatggaagggaagacttcttaggaaataaaaactgatttttgtcattatttttcttcagtgcacacacagaatatctgtcctccaacaccagtcatttcaaaatggggctcctaggactgtattagaaagaccaagaagagcatacagtacaggaggtaccaaatggatacagcctcaacattctgagctttgccagaaatgtctgtctgtcttctcccactgtttcctcaattctcttcccctttttcatcttcacctacctccattttcttgagttttcttgtgcagttttggtcaggctttttattgagaacaacctcaactcctgccaatgactttacagccttcctctttctctctggatgttcttaacaggtttggatgaagctgaaatgtaaatgtatctgattcttaattagaagaattcaattccagagtctgttaggactttgggagtaggagatttgttttcacagtaaatattctcagaaggagaagggaacctagtctgatattcccagaggtgaccagtaataggaaatcatcttgacagatgaaaccactcgtatctagaaatcagatgagtagcgggatgagggaaagacagtgaagcctcggaagtgggagttggttcagctttgttagggagatgcaaggagataccacaccagtcagagaaagtcataagatcaagaggtatggaatgtggctctcaagtggaaaaaaaaaggaaggtaccgcattttccattctctgccttgtttttttaattcccgtgataattacaatgagaggagcaatcatgttgctaattttacttcatgcgtttaagttctaattaatactatctggttcttctgcgttctgctgaggtgaaatacagcatgctcctttgcacttacacctttctttctctcaagaatttgcataggaagtgaaggcatgtttgcatgtatcgtattttagtaattggcatccctgccttcacagttctacaccactttctagtctaatctcctggacctttcctctctccattcaccttggcaaaagtggaacagctaggggtttcaaacagccctgcccctcagagaatagggaagtctgatggagttgccggcagcagacctaagccgccagcaggctcttcatggatccccacagagcaagatgggagatttctcacggtgagaactgcacggctgaggccgcatagacattaccattgtcctgtacagaaaaggaaaccgaggcccagggtgatgaagtgacttgcccacgatcacacatttcatagcctcagatctgggatttgagatgtgtctctgcctccaactttcttatgatgatgctgtgagatatgaattatatgagaaagggctttgcatgctgtcatgtgcaaggaaagtttgagctattatttttctggttaattaacaaaaacattgtcatgaaatgtctgctgcattctccgttctcattttgaaagcttttgtggagcacaaaatgttgctttgtgacttctagtggcatagctcacatgtgctatagatgcacgcgtgttatgcttctggcagcccggtgtgagtaaccatggaaaacagttggagaggtgccagtgttggggctgagtgtggggccagctattgtctcagagacacctggtttaggacagatgcctgctgcagtgtgccttcacttcaagcaactgatatttactgactgcctgtgataatgaactaggtaccatggaaggcacaataggttgcaagaggattatggaaagaaagataaagaaaatacacaggccctgccttcagaattgccatatgggctggcaaaggttatgatggaaccctacgaaagtgcagccttgttgggtcagagggagccttgtgaaggaaggggtgtgtgggcgagtaagtagggaggggtgctgtagacagaggggcagtgtgggaaatgggttggggcatgggagagcatgccacactaaggaagctgcaggatcccagacctcaaggtcctggcatgttcttctgaactctttgagcttcatcctgaaggcagtgggaaccactgaaggctcttgaacaagtgattctcaaacagatttgttagaaaggtccctgcggcaaaaagagtgactggactgaagagggttgcgtgtgggaccaaaagagcaggtggaagaggccccccgctcccactgcctggtgttcagaagatggtccattgaagcttaggaaatgatttgagcttgtggttggaggttcaaaattagagagaatgcatgcagggaaataactagctcttctacagcctggctagagtcccttcctacagagaccagttaatagagagcatcatcaaaggcaccaagagtttccgtaaaggacttagataattatttgcccagtgttggttgaaggaaattactttggaatgaaccagctgatgcagttcaagtgcccgaggatacattcctctgcctgacgttttatacctgtgcgaccactgccccgcccccatctgctcccccaatccccgtcaggatcctgcctgctccttccaccagggtgggaactacagcagagtgaaggaaaacagccctctcctaacggcttcctttgtttggttcagacttggtcattgtactttgagagttaaaattgggtctatttctttctgtatccgtccggtgtttgtcattcaattgcctgtgcaggttctctgctttatttcatttaagtagctgttatcttctttgtatcataagctcctaaaatatagagtaaggaatatgttttgttctggagagtgaacactgcatcttcacaggcatatgagctcaataaataaatgtgtaatgttgaacatagtgatgtagccatgtatttggttacttggaaaataatagggaagggagggaacgatagcatccgcactcagaaggtttgtaaacattaacacctccatgctcctgcggagtccttgatactcttcccctcaatacttacatggaccctcattacaataagaacagggtggggtagagaccatttttccccattgacatatatgaaaactgagtcacagaaagactacggactcaggcttgtcgcaacacaatggaaaaagagagaagcaccccactggactccatggaaatcaagctactaggcatggttgctgcctctctcaaatatgaacaagcaagctgaggtgatcgcaggtaaaatatatgaatgcatggcggcttccagatggcagaaatcttgttaaaatctgagtaacacccagtgcattgtcaagctttcaaaatgttcattgcaaaatcttacaatccactcaccccagaaaagactattactaattttgggtcaaagaatcaggagatgctcgctgtcatccaaaatctttcttgaagtaagtagctaagtagccttaggcttatgaaagaaagagctgcacagacttaacctctgtaggttccttattgataaattatctcccatgtctctcccagcaccatatttatactcatttgtaaagttctcagcagaaacttcacttctacaagcccttccctgacccattagactaggctgggttcctccacacacgtctactttctgcacaacacccataatttcctatcataagaaacagcacacttctgcattataatcctgtctttctgtgcctctctgcatgagtctgtcttgtttgcctctgcattgaattccttaagagcttaacacaatacatggcacataggaggtgctcaatgaacatttggcaaataaatgggcatataatcccatcctaatgcacttcagttcatccacatctttggagataactgcctgaagtgaagtttaaggggtaagttagaagcacaggtcgggggatggctgtgagttgaaaggttccccgggggacctaaagaatgggccacagagacccctgacacacagccctccctgccagccctgtttaggtggattccagcaccttaagagcatgtctgtttatatgtctgatggtgagaacgaggcctaacgtatttgggaaaggcaactcccaggaagaggacgtttccatgcttctgtttctggcagtgatggacttccctgcccccattatctcttcaccctggcttacttctttattgcttccaaatatgatttttctcctgccattcggctctgcttatctgctttgctgctgatgggagcatacttcccagcctggcatttgagggcagctacagctgactctagtctttcttcctcggtgttctctctctgctctcatcagaccaaacctttaaacatctgccccagagccacacccaaatctttattctttgtttgtttaattaattaattaattttaaacagtctcactctgtagctgggactataggcacatgccaccctgcccagccattttttttctttttttgtaaacagggtctcaccatgttgccctggcttgtcttgaactcctaggctccagccatcctcccaccttagcttctcaaaatgctgggattacaggcgtgagccaccgtgcctgccccatacccgtatctttggatacctttttcttcctagggggaacaccttctcacctcttttctgtttattcagctgatcttttgtttgtttggttggcttttatttatttatttttttatttcagtaggttagtggggaacagatggcatttggttacgtgaataagttcttcagtggtaatttctgagcttttggtgcaccttcactcgagcagtgtacagtgtacccaaggtgttgtcttttatccgttgccacccctgacctttttccctgaggccccaaaaaacaatgtatcattcttatgcctttgagtcctcatggcttggctcctatatatgagtcatataggaatatatatgactcatatgacatttggtttttcattcccgagttacttcacttagaataatagtctccagttccatccagtttgctgcaattgccattattttgttcctttttatggccgagtagtattccatggtatatatatatatatatatatatatatatatatatatatatatatatatatatatctcacattttctttatctattcattgattgacaggcatttgggctggttccatatttttgtaattacagattgtgctgctatatacatgcgtgtgcaagtatctttttcgtattatataatgacttcttttcctcctggtagatacctagtagtgagtagatctacttttagttctttaaggaatctccacactgttttccatagtggttgtatttttattattttattatatcctttattagtttactgtccacatgctcctgccacccactgaactccccaaatcctcctcccctccccacagaatgtccctcgttagtacctaagcctggctggattgtgtcccctcacccctgtgtcagtgtcccaggagacagaaatgttcttggcactccaaggtctcttaggccagggccagaagggcccccactcccggcttctggctgcaggctctaccttgccccgtgtcctctctcccaggggcagggctcacctgtggttgcctgctcccagtgcctgactacagaccaccctccatctttctagcaccttcctttccttgcagcctcccaaatatctcacactccctctccagaagagttccttctgatcacaaagcatttgtgagatttacacataagattgcctttgttccagttctctagaggcagattctgggatacggatttgtgtggtcatgacttattagggaagtgggcctaggagaacaggcagaaggtgtaagggaagccaggcaggacagggcaagaagccaagtggaggctcgattttaggcaaagacccaccagggtgaccaggcccttttacaactcccacacaggccacacaggctactgctaggggccaccctgggggacgcaaaccctaggcacttgtggctgtctgtggaggtgggggtgcaaacagagtctcaggctgggctgtcagaagcagaagcacccagaacccagggagcacacagaaatgatggaaggggccgaggggcctgggctgaaggctgacttcctgctttgtcctgcacagggagagagagacagggcagtggctgtgcaaatgatgaggcccccatcgaggtgagggagggctctggaatgacaacaggccccagcaaaggtagtgtcctcccactgggagctttcctctttctggggatgcatcttgttccccaaggtgccacgtcacctaggttaactatctggagagatccagttaccttttctgcacttaattactcacattttcttgttttagtgagtgttgtctttccagaccctggggaccccttcctctcagcctcctcacagtccactagagagaggagaggcttctgtgggctctacaggatagggacagagaaggatgagcctccagcccctgcagtgtgtattgcatgttggtcctgctctcctgtcccacctgtgtctcacctccgtagatggtagaaatggagctcagaagccagcagcctctctccttggaggatgccagtccactcacctactgtgcctcactctcacctaggccccaggcagtcatgtgggcactgtgttaccaccaaaggtgagaggatgtgttgccaaggtcacttagtgagagaacagacaaggcccacctcgaacccaggtgtcccctttgtccctctggagttctagttgtatttgacctttcttcctgtgaactgtggggtttggatacagcagagactgtctctttggttgtgaaccagattccttctttccagccactccctcccaccacacatggccacacatgtacatcatatgtgtacatggtccctggggcaaagatcaggtggacaggcagtctgcctgctgcccagttcgcacacatgggtgccaggcttcacacacactaactggaagggaaatggcagctgcatgtggtctggggtatgattttggtctcctaagctgtgatatttttttttcctcttcaagtcatgttcaagttctaagtatggatggtgctttagggtgataggagtgtgctagaggcaggatccaggtcggattctggggtttgctggttaaagtgtgtcttgacaaagaattggaggtggaactagccccagagatgaagccaggagtgacacacatgctggcttccccagaggccagtgcatctccttcatagtcgcactaggccttgggcatgggaggagcaaggtaattccagccccttttctagtgtgactccatgtggctaatctatactgttcttcctagtttgcctgaatacatcctggtttaatcagtgtaatcgcaaaaagtgtctgatttgaacaataatcagtgtaacaatcagtttaatcagtgtaattgcaaaaaaaagtgtcgatttggacaactgccaggctggcctaacttgtccagggactgaatgaagccccatttcttcatccagtgtgtcccatagtatggggtgacacacactggccagtgagggcaggactggagacaaagcaaagatggaggagagcctgcagatggatttgtttcagggactcctgtttcttcttcgcagctccttccctgccaaggagggctgtcccctggagaagaaagagacaagctcaagtgtgctaccatctataaccatcagtgattctttgagctggcctttgcagagttcttcattttggttccctgcctgctctttgtcttcaggataaaatgcagactctttctttcacgagggcttattgcacaacgaacctgtaatagtcagggatcctacagggaaaagatggcatcctcaaactgggtaatttgagcagagtttaataaagtggatatttatgaaggtgcagccaaggtgtaggaaaactgtaagggacagtcaggaccctggggccacgaacaggaaggcactgttaacacttttaggcctgaagggataaggggaagaggtcatggctgccaccagactttgatggagggatatagacagctggtggatggaccctgcttcctccccaaccccgactcctgccactgcttcccagtggcagaacaacaggaggccagagggcagggagcctgtccacgcgatccgtgctggtcggcctgcactgggtggtggacttgcggacacacagagagcaacgtgctagcttgctggctttgtccctgctaaattttctcttctacccatgccttctattccataagctccccgtttccatccttccacaaactcgccagtattttccccagctcctttgtgctttgctcatgctcctcctactgctggacatgctgcaccttactcctccttgctgtttaccaagctctttccaaccttggcagccgcctcaacacttaccaagatccaaattgccctgaaagcaagcacgagtcatgtgtgagggttcttggagtagagaaaaaaattgtatctacttcctgccttcccagagttccacatatgacaaaaagataaagcatggacatcctgcttccagtacacaccaagataaagtatgtctggaaaacactcatgggggaacagcaaaattttgcagagaaaagcttgccggtatatgaattaatatttaagcttgaccttggtgtggcataggaatttgtctaacaaacaataaggaagggcattccaaataaagcaggaagtcacagaattcccaatgtgaacagaatgtacaggaaacagtgaaaagtggtccggtgcacctaatgaatgtcatgttcgaagcagtgtggggtgggagtgtgtattagtctgggttttccttttcaacagaatctatctatctatctatctatctatctatctatctatctatctatctatctatctattctaatctatcgagagacttataagaattggctcatgtctgtagtgtaagtttcagtctcagtccaaaggcctgagacaaaggagctgatgcccaaggacaggagaggaatgtcccagctcaagctggaagagtgaagtgcccttcctccactctttcattctgtccagaccctcagtgtattagatggtgccctcccacattggggagggtgggtcttatttatgaagcctgctgatcatctcttctagaaacacctcacagatacacccagaaataacgtgctaccagctgtctggcatcccatagttcagtcaaattgacacagagaattaatcatcaccgaaaatgaggtggaactttgtagggatcactcactgaagtccaagctccaatggcagatggagtccagcgtgaattcccactgaactttcggcacttctgggctctttcctttatgaatggttggtctccatgacaggattccagagaccactcttctgtgtttggactgttttgaacatgctagggaaagaaaaggaaagaaaaacatccaggttacctagctttggtcacctaggggaaaaaggctccactgtctgtggctctatgagatgatgaagatgccccaccttgcccaggttaccttttgctagagtttagaatttagagttcttggctacatgtgtgtaacagagttattgaatcaaaaaaatggcttgtgggagccgtgacttacaaacaagatatgacctattgagcaagcccattcttgcttcagcatttaaattagtgttgggcttttgttgtaggtacaaatcaaagtgttgtgccattcatttcagaaaagtcacggcccaccaaactcaacagagtttgttttgagaggatactactgtatttgacagggacaggaaggacaggtggtaggtgtgcttatggagaattttctggaggtgcacagagcaaaggcttcttgatttatccctaggacattacagaagtggagggggactgcctccttgcacgattctcacacacagtgaccaggtgttgggggagatgtgtgcatttgtatttgtgagtgcaggttggtggggacatgcagagtaattatactcacacactgggcctttattggatgcaggcctcatggtcttttatctctcgggagtttgtgaaagatgggagattttaatcaaataattaatcagtggacagatatttattgtgtgcctacgttgtactctacacaatgttctgtagagacacaagtgaaaataagacatgatccttgcttttcaagaacttaaaatcaatcaagtcagcaatgttacatccctaagatgagaaagcagtacatgttatagactgtacaataggtttatttgttgaatttttacaataaacaaaagaatgtatttacatgcatgtttccatttaatcttctcattaaccccatgcaagaagagaggttatttctactgcaggtgatttaaatgaaacccagtggagtgagataacctctctgaggcctgaggggcatcaggaacagagctgggacattccttgtagcagtcagacttcagaccctattctctttgctctcccggagcctctctctgactacaactacctcctagcggtgtgggactcacagtgcagtgtgtgtgctgctgcttttggttttgtttgtttcctttttcctccccctaatcctttcacctgtatcataagtgtgctgtctgcttctacctaggcatgatgagccctcttactttcatagctaggaaagattccatggcctacctccgttttcttatgtcatgcaaaaatggtaatagttgggagacgtaagaacagtgtgcaatgtgagtctaagtctagtatttttgtctctctatgacccagatcaattttgtaaacttccacacaagtttagagtctaaaagaaatccagtagggtcaaaattagcagcctcagtagtgacgctttctcttacaataaaggagtaaggtgctagctgatatctgaatgttcagtgtcttcgtggggaagtatcctgttttgttaatttcttagtttcccccagagaacactttctcacaagcgcagatgtggaagatgtacacgccaaccccatggcagcgtgtgtgggtatttctgagccatttgcgtcgtgatgttcccctatgatgcttgaggggaggggcagggcacaagccgaatgctcagaggcaccaaacttaggggcagctggagcatttctgtgtgataagaggcaattgtgaccaggtgctgcgaagggcgaaagcacttattttgctgtggcttcaagcattgcttgagatgcgctgcctttcagacacagttaaagggccatttgatagaaggaacggttggaccgcacactgtctgcatccattattgccctcagatcttcaggcaggtgtgtttaagaaaggccaagcctggatgtttctctcttttttcaataatctatctccttattgcaacactctctttgcccatctttagaagattccaagcagacacttttgcttctttttttcttccaattcccaggttctctctctctttctctctctctttctgtctctctctctctccctctctctcccccctacccctctctctctatctctctttctcttttctcatcctaaatccaaaagtagcttcaggacctgagtccatactttcatggttctatttctgcggtgcacatcttgggcttgcttaatcatttgtttttgcttttcctctatgtgtaaatgcagcatgtgtaataaaacaactattcatcagagagatattcaggacacagagggttgcatttttagagcattggaacaataggtgcagctgcagaaaattacaggtatggcagtgttctttctctaccatactcgagctcccatgcatgagtgagcatgtgcacatgtggctggatcctcttttggccaaatacaccctgaatattgacacaggtggggcaccctcaataatccctgctcaaacagtataggcctattctctaaaagaagacacttatccaaaaaaggaacatggtgcagacagacacacacagactaagaaggggactgtggctcggtactgaaatggaaaacacatgccttttccaggctttatttctttttgtctggattcttccaggatgctgagtatgctaggccatgggctgtccacgggggccacacacaggaggggaaggccgcaggagggatgctgatgggaaaaccattcacagagacacagaaggctaatggccactgccagagggctgcagtgcggggcaactggagggcaacattgaagctggaggacagaagggagctggagttgcagggcccagtccagaatcctcaagggaacctctgtccctctattcttcatatatgtggcaggatgggcagagaggatgccagcggtgggagggcggtatatctggaggttgtggacgaaaggggagaggctttgcaggtctgatctgggaacatcctgcccttttgatcgcccatctcccacctcttgttggcctatgttacattgacttgtgactattcctccatatctgatgagcggccatctccagttcagctcacctggatgagtcagggacagtggagtttgaagccttactcactctgacttaatcaccagttaaccaccatcctgagagaggtgagataccgtaccgtgtttcaggagcagttttgtagaaggactatgtcaagggctgtctctgcaaagagaggactcgttgtctgaatgtcccacctccagagccttctctgtggctgagagagcaattatgctcattttcacttttctttttttaaccgaggagcgatgtgtcctctgcattgttgaggagactggatcaatgagacagatagatgggggcaggtgtgaggaggtgacagagttggctgccgaggtacctttgtgatccatctctgcagaagccggcattcattccgtggggattcagcaagactgatacccagcagtgacagtttggacatctaaacatgaccttggatgtgttcagaaccgcagctggaactgtgccaactcctcagagtagtacatcacaggagccgcagaaccatgctggaaattggctgcgttctgagtgctagtgcatctgcagacgaacctctctggccctgtagtgcggtgcagtgttgggggacggcttccgtttctgtcaattttcaataattagatgctcacaaggaagcccaggacagtcctctcgtgttcatcgggaggttgtgagatgccctcgttgtgggcatcaaaaataattattcaagcagtttagtgtttgtcagtcagcgtttcctgcaccatggccactcacctggtacttgtcagatttcagctgctggggaagaaaataaaggactctgcttctggtttccctgaacatatgggttacaggaaagttctctcctgtaacgtatcagaaaactgtttcataccagggtcctttcctagtgcctattcactctgcaactctcatttttgccaggaaacacacgtctaggttagaggttctcagggagctctccagaccagcatcagcagcatttggaattttgtcagaaatgcagcctcccaggccctgcctgggcctactgaatcagaaacccatggagtaaggtcccaggaatctcttttttatcaggtctttcaggtgattctgatgcacagtgaatttgagaagaactgatttagatgttcttttgggagcacctataagaacactaaatttggaaaacaaaacaaaaactggcatgaatcctgcttctacagtttaatatcagcatggtttcagtcaatatggctaatgttttttagcctcagctaattttgtctgtaaattggcaataagtgaacccaaccaagtttgtgagatgataaaatagtacacatagtgggctcatgtagtcaattaacattgaccatgaatgtgaattcatccagtccctgcttggacccaagtgaaggtcagagcagtggccacccttcagattattaatataagctatcctagatacattactagcaaagcaagctgcaaagtgtgtttttgttcttgagagatttcaaacttatgtcgttccaaattcatgtttcagacaaggcagtaccagatggcagtcatggggtctgcaaggagcataagggaaggtacacccttaggtgtagtaagagaggtgcaccctctatcgactgtagttttctccttcttgctcaccctcagagtccattctggatattgtcatcaaagccacaagaaaggcttggatcagttcaaacttcatgtgcattcaggttacctggacatcttattaaaatgcagattcaaatttcttatctctgagaggagacctgagtttctgcatttctgatgagctcccacccaagtgatgctgatgttggtggtttgccagccacacttttgtgtagtgtggtgctagctcagtgcttcttaaaccctaatgtgcacaaaactcatgtctagatatgaacttctagatgtgactcaaggaatgaccaggggccatcagctttggcattacctgggagcttgctaaaaatgcagaatccaaggccctacctcagacctactgaatcagcatctgtacttcagcgaaatccccagggggctcatgtgcaccgtaaagcttgagaaacatgtggagctggcttcacaactttgtttatttccatagaaatctgtggttggtttaaggctgtgttctcaccaccttgaaatccttattcatgcttgagcaaaatattctgtgttcttattttgcactgggccccataaatgatataagttgtcctagacacactgctccatattagtggttttgaaacattagtgtgtgtatgacccaactgagatgttgttataaattcccaaatattctgaatcagtagactgggggtgagactaagaatctgtaataaacctctcctgtgattctaatataagtagtccatgagcactttgaaaggtagtccccagatcttctccaagctaggccttcactcatttccatgctgtatcaggatggtgccagagagagcccacctctcatctgcattgccagaaaatgcaatgagctgcaaaaaacttgttggacacctgtgccaaggtgtttctttttgggcagtatttcccacaagaactctcagcaaactatccctgtgcacctaagtgatccttacataatgttgagacatttacataagcaaagcagaaaggatgcacagtacaggatgtctcatggggacagggggtctcctgaagaagcaggtgtgtatagtagcacttgttagaatttttatggtcacaaaccattttgagaatccaatagaagccatcacccatcctcaatgaaaaattcacctttgcacattatgagtctcacatagtaccaggaattagaagacttgactgagaggtctgacttctatacttctagctctcattccttggacaagtcatcaggctattcagaaccctagtgtcctgatctttaaagcagagaatgggtaagagtgtcaacctcataaatttgttgcaaaacatcaaaggagacattgagctgtaaaagtgctttgtacactgcaaaataatgtatacatttgagacatcattatacatcctatgctacattgttatttccagcattatagtcaggatcaggacactgcttgtaaatttagcctaaggccatggaacagacttgctgtagtaagagagggaaatgaatacagacagaaagacatgatgaggacttggcgagagttgctgggaaatttaaaagtgtagaaaagagaagggagattccacaattcaaggactccagatgcaaaaataaaagaaagaaaatctatttttatatgtgcagacagttttgagattttggaaagtggctttagtctagcagttaaccgaacatttctgcccctgggtataatgaagatgaatagcaatagtggtggtctgtatttagttttgactgcagaagccttctgtgggaatttgctattctgagatgagaggaatgatgtttagtagttaaaagctgggtctctgatctaacacataattattgtgtgacttggagaactagtttagtttagtttctctgctcttctaggctttttccaataaaagattcttcatagggttattataagtattgaatgacttagtgcaccctaaacagctagacataactatgaaggattatcatcacccaaatccttgagcaaagggagaactggtagtattcgaagtatccagccatcctgggcatgcaaggtacctctaggttataactgagatcgtatttgaagtggttctgtgctcaagtggtttgagaagctccgagcaacattctgaggctgtaatcccataagacctttgctgtgttccagaaaagtccacccctgacaaatcaaaggaaatgtatgtgttgggggaagggagaaagacaagatattctagccttgccatgaggacctccctctgatggctgctgtcgtctctcagtcccttgacgtacctgtctggtcttcccttcaggtgcactattgacaaccgggtcacccgggtggcctggctaaaccgcagcaccatcctctatgctgggaatgacaagtggtgcctggatcctcgcgtggtccttctgagcaacacccaaacgcagtacagcatcgagatccagaacgtggatgtgtatgacgagggcccttacacctgctcggtgcagacagacaaccacccaaagacctctagggtccacctcattgtgcaaggtaggtgggcggggcttggcggggagatctggctggccagcctggaaagccttcaggtaaaggtttgttctctgatcctcaacagagatgagttatccttattctacgcatctggggtccagggcacatttctggttgtcattttgcagttagaagctaaattttccagtcattttcattgagtggaactaggaattgtttttttcatttttgttccaataatatattttctcaggaaattatcttgtaattattgctcttcttggcttttttctcccctaagttttagttatttttgtttgtttgttttttgttttgttttgttttgttttttagatttcatccaattccaagactgtgttatgtttaaaaccagacttttaatgcacttttggaagtacaggtatgccatgtccccctccagccttgaacgaaagcagagccaaccaggatgcactgggcactgccctcagctgcatccttcacaagcacctgcttgtttccagctcacttgcgcctcctctcctctcccagccaggggttttggatgccatttctcccatataatactggtgtctgattctccctgttttgattccatcccaactctcctggccttcttctcctcccctgactcctagttcatgaggccttgtatgtttgtgtgtgtgtgtgtgtgtgtgtgtgtgtgtgtgtgtgtgagagagagagagagagagagagagaatatgtgtgttggttatgctctcttagaccctgggaatggagctcacctcttcccacaaggcagaaccagtcctggggcattcagacaacacttaacccggttgaaggattcctagttagtgagcaagagctggcatcacacttggccactttctggctgtgagaccttaatcaagttattaccgtgtctcagggttctctttctgtaaagggggtcaacgtgaggattgaactgtaaacgtactgacatagaaaacacgtagaagagggcgtggcacatacaagtgctatttcagtgttagctatggagctttcttttctcttttttaggacttttgtaatttttaaaatttttgagcatcttttacagtgggtcaaatatcttattttgtgatgtcagcagtatagcccctgagcagcggcatgccagatccagtgctggagccctttcccaggctgatcccgaggccctttcaaccagggacgtgtagctccagggtgacaaactcctctcctaggggctccttccaccagtccccttgtcggtgtgttcaagaaaagggtaaagaactatgggatgattggttagagacagaataggaaggaaggcagcttgagaaggaagaactgaagtgagccggaagaaggaaggggaggcctgctgtttgacagtaggggaaggcggaacttgggtcgtgatcagcactgttgagtgaggcagggtgagcaggactgagaggaggacacatgagaacaaggtgatgctggacctggctgtgggcagaacgtatgccaggggacatgggaatccttgatgctgtggcccaagtttggtcatgccaagtttttattatattttgcttactctttcttccccaaaggaaattacaatggctgtttaaaaaatgattctataaatgaatactttttgaactgatgcatgcaaacagcaattttaaagaaaatagaattgcatagaaggtatcagagtgtattacaaagagtggagtaggtattgccatgtgagatttttgtttcagtttgtgtacattttttaatgtaaaatacattttttattatggatagggaggccaaaaatgcttgagaatctccactctgtgggcagggctggtgaatgccctggtgccaccatctgcatactctaccaggtggtggtttggaagctattgctcagcccccctcctgtcctgccccaacccctgcacacttagtgttgagaaaagaatgcctagcattgacaatgagagactgggaactaggaactattagagatatttgctttaggaagcagggcctcatggaactggaaagtggaaggaattgtgaaaagtgctaatgtctccttgaaaactggatcatatttttgtcattttctttcttcagccacccccactcacacacacccccacacccctgccctgaacacctcgcagaatgcctgatacaaagtgaacatttaataaatgcttattgaagcaaatggctagaattagagccaggtgatcttatatgggctccaagagagacggctgggtgtttttgggggtgagatgatgggagggggtgagaggatggagtctacatcaatcttcactcacatccaagctaatggaaaatgtctaatcccttgctaggtgtttacatctgtgacttagctaggtgccctctcgcatgacacaccacctcaagtattggaatctcatcttgggctaattttcgaatgctgatgggtgtattgatctggaaacaagctgggttaaaaaaggcattggtcttttacacagactcagcccaagctaatccgctgtcgatatgcctggactgagtattatcgacactttaatgaatagaggaccatagttttttcagagccaaactgaccccctcttcaaagcgatcagacaaactaaatagagccagattcttgtgtttctgtattggaaagaggatgcaccaccatcctggattacaaaaaaaaaaaaaaagggaaagaaatatatttatcttgggatcgtttattataccaaacataaaccctaattcccctagcagaagctgactctctggatttgaagttgctattcagccctgagcttctggaataaaagttgggcatattaggttttcaaaatggtattatgatcctttaaaaaaagaaataaaaacagcaacaacaaaaaggaactaaattgatattctgcccatgagtatgtgtatttatgtatatgtagtcaccttcatatctaaataaatccacacagaaggaaggtagtggcatctcacagcattgcacaagctgcttcaggtctggggtatgtctttccccttactgtcaaatatcccatctaccccctagttctctgtactggattttcttcccctgtggttctgatccaatatggttatttcttgcagacagccgtgaggccaaggcgaccacatggagcaagtctctggggcaagctaggagcaaagggcatcctgggggaggagggtgaccctggagccagtgtgggagggagatggagggggaaggcggcagaaaggaggagacaagagaactgagccaagtagctacttgccagggtggctattttaaattaaatttaaattagctacaaccaaacaacatttaaaatttacttcttcagtcacactagccacactgcagtgcttccatagtcatgcaagactactgttcccttgtgttcattttgcattactataaaggaatgcctgaggctggtaattcacacacataaaaaagaggtttatttggctcatggttctgcagcctgtacaagcacagcaccaacatttgcatctggagagggcctcagaatgcttctattcgtggcatggcgtgaaggggacccagtatatgcagaattgcatggtgagagaaaaagccagagacagcagggacggtgccaggctcttttttaccaccagctttcgagaaagctaatagagcaagaactcacttgccccaccccctgcatttatctatttatgctccatccccatggccagacatctcccattaggcccccacctccaattttggaatcaactttccacataagatctacgggaacaaatacccaaactactgcactcctgtgttggacagtgcagagagagaacatttgtgtgaacttccattgtaaaaagctttattggatagtgctataaggggttaccattatggatcagcaggtgttaaagctagaatggctttccatggcttgaagggctaggtatattgtggaaaggagagtggaattttggaaagagaatggaaattttaaatagatggtgctcttttaaaaacaagagagaattgttgaaaaagatggagtaatggatttcctaggttagcttcaattgtttaaaaagatggagtaatggagttcctaggttagcttagacagagaagagtctggagtccaaggatgtacctgcaggagagtaggcagagttcgagggttggttaagtgtgagcatgggggtgatgactccaccaggacactgagatttctacctgtgagctcaggggacatgaatactaacatgtctaaagatcacatggcaaaactgattcatcagcagaggggaatgagttcagatacctggatttcttgactttgagatgccttgaatacttccttcaaatgtgaaatgtaagaaataccacccgtggatttgcatgtcctgaacataatctttttgtccagaataggggagattcatctaaaatttattaacatttaggtctaatgatttccatctctttgaccttagggttttttgcctaataaacataattaataagtggttctctctggagtctagcagaatattttattcctttcaccctcttaatcctgctaccaaaccgagcatattgtacatctgaaaaagccatactactgtctccattgttcctttggacaaggttacatcttggaaaacagagtggataaaacattcagtgggaatgaattgtttggcaagttaaggacagcttgagaagacgtctaaaaggccccgtctgtgtttctaagaacccatgaatggtggtagagcaaaagtgtgccatggttgtgtgcagagtgttaagaaaggtcctccttatccaagtatggaaaactgacttctccattttgactggtgtacctgcaggaattcactctcacttagagacacatttgtatgacagagaacagtagaatacagtgcttataaaaacagggatattagtgtaataaaaaatgttaaaaaagcttttagcctctttgtcagttttccaggccctagctaggtttctcttttgtcactggagtatctaatcatcccctcccttttgtttggtaaaatgagttttcctatttcttgctgggcagaattaatctgaaaatccctgctattgtttgatagttaattacctgcctttggagtcaaacagctccgaagctcaggtaaagaagggaaacacaaatgtctatggaatagggcaggaatgagggaaagaagccaggacattctgttcacttcgtgtgttaaagtaattccagagagaaagggactagactagggagacacccagcccaggcagtgacttgcaaataatggaagtatggccacatcagcccctaatttacctttgattgtctccctatttctgactctctctcttacccacttgatatatacaaccgtgtttctttccaatcctgaataattagttgaccttgtcaagcaaaagctcattattatgattcagagaacaggaacaataacttttaatttctaggtagctacaccctagagacccctccccactctgaatctgaactgaaggtaatttgaaacacaaaatatcaaaggaaataatgtgacctaatccttactttgaaagcaaagctttctgcctctccagacatgtcacccagaaagcaccatgcccttctggcaggacaaggctcccggagagctctgcagatctttgcaccaacacttcccattcaagcgagtcaatggtagaggaaaacatcatgatccaattcgaaatagactgaagtcaccttctgagaacatctgtgttctctagatgtcagtagccctgtgtgacagatagtgggggcatactgatcatcccaaactgctttccaatgacctctctttttcctgtcccattcaagaaatagatgaaaatgtatatttggtctggtcataagactgtgtgtctaaatttgatagaactttgaaaaagtcaggaaattaaattccactataaaattggagctctcctcaaagcaccccggagaatgacaaggaagtagggcattttacctgcaattgatgtacactatctagacagcatgcagatgaggcaactctgttctacctggtgagttttaaaatttcttgaagcagttgctgacaacggagggacaaaaattgacagaaaggctagagcacatttcagtaaactcacctgaggtatcgtctgtctgctaagccaagtagggcaaaatgtaaagactaaagtaatctcagaaaaatgccagaggaaaagttatattcattgaataatggcattttcttttccttttggtatggctgggaaggggtcctcatgttctctacagagtttggaaaacttggcgtcttttgcagaagagtggataaaaatagggtcccctgttctagcctttcacacccactcatagagaatggagcagaaagtttagatgacccttatggctttacagcaagcacttacagaagtcaggcaacatctctccaggtaagcagttagggctcccatgggaaagtctgtaagcagccactgagttcttaccccttaggtgcttttccacagggagtcttggctgcttctgagcggcctcagagtctaacaccataggattgagaaacatggctctgattccttctggatcttgattctttctgcagcttccaagtgagaaatgtcatttattttggggaaaggacaaacaccagatcctgaataatcagctttttcaagatgtatgcctttagactcccattcccatatgagagtgctgatttattcaagctgcacttgaagaaaatcttcttaattaagggttggatgaggtctctttatggtctcatgacccaacactacagatctgtctaatcctataatatatccaaaattttcctcattaccgtattcctaatggtttcagaaggtcacccatacagagtgtgtgatacagcaatatcaagagcagctgacttggatgccatcactgttaggagaagattcttagacactcaaaagacccaaagattctggttgttcctctcttcttaataaaattaaaatgcgtagcttcttaggacatagggagtagttgatgagaaaggtttccgtccatctgttgtcagatcgaagacactctactgaccctgttgaattccatttaacagtattttgaagccaggtcctggggacacaaagattcagacagagctcctgccctgtccagcagaggagaccactatactaacaaatatctgtcttataaggtaacagggattaggatgtttgagggtataaatgctatgaatacattgaaatggagtaattgaatttacctgcaagattagacaaaactacaaagttatatttcatgagggtcttcaatgggcagtagagttttttaggggatctgagaggaaatggcatcccaaacaggatcaatcatgtgtgcaaagcttggaaggctgaacgtgtatgttgtgttggacgaagagtgaggacgctaatatggtcacagggcagagttcctggggtgaaatcactcaatatatggctagaaaggtaggctgcatctcagtttcaggtggaaccagataggcttccaataggcttatttttttctggttgtcctgctagaatgctactttctttcacaaggaagtgcacattagattgttttgacaatggacaaatactcaaaagattatcagtggaaaagaacatgacaaacacctaagtcaataaatcttgggtagaaaggagatatattggaaggaaagaatacatccaatcccaactggttctatgcttcttgcatggttaagacacaaaggggaaagattgccaaagacttttctaccaatacgtcaattttcaaaatctctccaatgtatgtcttacatttgaatttgtaataatgattcttcttccatagtatagtaaggtgcatctctttgtgtcttagcaaatagagggtgtggtactgggttttgtgctgtcatggtgatgatcatggcagagagggtgaggatgctgccgaggatgaatgacagctgcaagaagcagtccccagccctcaggtcctcagcagcctcctacctgagagtcctcatacaaatgagaagacttcctgtttctgatatctccaggctaatttaggctttgaggtgtcaccacttggagtgtatgttaagacatgttcctgttgaatgtcgcctgcagtaaataattgtctaacattggtatgaaatctaattggcttccgctagagcttggctcagcagaggaattcactcctggagtttttggagcaccacactttcttcatttcatgttatttgagaaagaatttattgatgcaaaatcagggcagtttaatttggtggcatgttttctttatgtctcaattatatattcatgtctttgtggtaaactcagctggtggggggattaagaattcaaaatagaggattttcacttggcaagtagtgctttctactgtgattaattgggagtctgcacaatgaacccggtgttggctccgttggggatttaatagcttagtagaaagaagtaaatttcaggatttaagagttttgggttacagtctgaattttgataattacctggaaaaatgatctccttgttttagttattccagattagatattcccaattagataccttttatagaagtgtttttgtgtcccataattcgatttggagaagggtgtcaagtaggtgcagggaagcagaagagcacccctcattgttgtgatcatccaacagccctaaagacttccaggtgcttacatccatttgtctttttctgtcttctttctatggatgcaatcctctagatggggaatgcacacatgtcctgccgctgatgtgggtccctgttcccagaaaccggtctgggtcgcatcccgtttctccagcctcagccgcctccgcggagctctattgctcctggctttctggccttctgacctggtgctcttcctcagctctcttgccaccatctcctgtgttctcacagttttgtttgggcatgttttatggtgttcttatcgtcctaaaacctggatttcacagaggggacctgtgtgctaacactgttcctcattctgagggctaggctggccaagccatttcttcctactctgagaaagaaagatgagaaattttgattattttccctttcacacataaaccatcatgtgtcaagtcctgaaattgaggttggaatggatacaaagatggatgagatgggtccctacaatggggatgtgcaaaggagtggggtgcaggtagggtgtgtaagggcagcagctctcacagccactggagagtccctgggctgagagcgatggctgcaagcttgggagccaggctttgctgttgcagaaggccaagaaaataataaagtcttttgaaattgagtaatgtggcgtttcagctcccgactgttagaatgaaaatagcgattctgccacacccactttgcacccctcacccctcatttctgcacttgtagcctgagtgatcttttcaaaccaaatctggaggttcctcaaagacttctctttagcccaagagagccaattccttatgaaggagttgatagtcctggaggccaggctccaggggacctctgctcctggttcatgccatgtcctgcctcactattttcattctagtgtattttttcttgttatttctggtcataggccctttgaacgttcccttccctcttcctggaattctcttttgcttttcacccagtcggtcctatttatccttcagactttgactcaaatgccatttccatagagaactttcccagacctgctaaccactgccactcccacctctgccaggagctagagccttgcccttcttcctgctttttgccacagttaaaatgtggcatttgtctgtgtgattggttgattatgtcattttttctgaggtcagggggcccgtatgcttgtgcattctatccccagtgcctggaatttaatagagctcagggactatttgttggataatctatctgtaaagtttcttttttattgtattataattattaaacaaaatgattcatttttttttcattactagttgtagtaggctgaataatgtccaaacaaagatcagattctaatccctggaacccaaaaatatactttgcatggtagagtctttacagatgagattagtttaaagatttgagatagggaaattgtcctgggccctaaatgcaatcacataaatctttacaaaagggaggcagaggaagatttgataggaacacacacagaggagaaggcagtgtaaagacgggagcagagggatatgaagatgctgaccctcagggttacagtgatgtggccacaagccaaagaatgcccatagccagcggaagctgggagcaccaaagaccagatatcttttgagagcctctggaggaatcacagccttcctgataccctgatttcagcctagtgagagtcatttttggacgtctcacctccagaatcatcaaagaatcaatttctcttgtttgttaagccactaaatatatggaaatgtgttatagaaaaaggaaacaaatacactgaccttcaatgttttgaatccttaatggatggaaataggaaaaacaaaaattgatatttgaaatctgccccaaatttagtctttgtcactgtgagagatgaagtaacactcatctttttcattatttctttttaaaaaaaatctctttggagatgcacccttgtcatgtaaatgcaatgaggcatcagctttttgtccttggggtatctacaggagcagatggagtcatccacatttcaaaactaagatgatactttttgatgttgaaaatttctgtcccaggggccctagggtatggaagcagggagggaaagacacctctgccaaatatggttttaatgagaggaaaccattgatgtcgcctagcattaagctgtgagatttggtttgtgaatgtgggaccagagttgaagattaaaatcgctaaacattctcttgttaactgggagagggacctcgtatttgtgttttttctccactatgtgtctcataggcatctcaaactgaaaatgtaaaacatagatctcttgaattctagccttctttcctgaccatcctctgactccaaccctaaacctgctcctcctggagtcttgccatctggtaaatggcaattgcattcttctagtggctcatgtgaaagctgcagtccgtcttcactgttttccttttcccgtcctcttcctcaatcctgagcacgtcctgctagattttctgaattcggaggtttatccagtcctgcctcttctgccctctcccaagctgctgttacctttgtctggagtgttccacagctttctacctaactggcctgctttttttgttcttattccctatcgtctgttctccatgctcagcgaaagcatttctgtgcaggcttcgttgttcctgatttagtcgcttcctggctcacctaaggtctttaacatccctactgtggcctaaaaggtcttccttggtccggccaccagtgtctccctggcttcacctccacacacactcccttttccttaccctgtctccactacttcctgatatgcctgtgatacaccaaggtggcctcctggcttccaggccttaaagctccctctgctggtgcccatgccaggtgtccttggggctctcttcttagatctctgttcaaggtcaccttaaggcagaggccttcttcaccacctgcataaaatagagcttccaaccccacatcatcacaccctagcacctttcttgccttgtttgttctttataaagtaactcacctattggcataatggatatttccgtgttggagagtggtagcctgtttcaacccctctagaacatgtgtgccatgatggtggggcttgatctggcatgttcattgttgtttcccaagtgcctagaacagggtctggtgcatagtaggcactctgtaagcatttgtcaaataaatgaatgaatgaaaacaaaggcctaccgttaagtggacttgatcatattttctcagtgtttgctctctctttggtcaggcgtgagagcatgaacttctctgttacttctatcaaaatgttttggtccctctagtctcagaccaggtgacattcagctgagttttgcagtgtgcattttcttagcaaggtaaagaattgaaccagattgaaggaacaaatcacacagcaggaaggactctgagagaccaaagatgagtcactccaggtcactgcctggaaagaaaacaggaatgatagaggcgcaccacagcctggatagcaggagagggccagatctctgccacccccagggtgtgggtttcactgtggaggggatggggaattataggaagggttgaacagggaaattaaattagttgtatttcagaaagatctctggcatcagaatgaagggtggattggaggggagttttgcagcagggagactgagagagaatgaaaacaaggctgagattgtattatcctgtgttcctgaccaggagacccccctctctccttgaggggctggacaaacagggctttagagcagccgatccatggccagagggcacatatacaggaagagtggaaggggtcccgtggccacatggttccagttttcctggatgatcctattcctaagagacgcgtttattctccatgtgtggttgctaagggagtaagtcaatggaatttaaagttgacacctttgtaaaagtttcaagtttatatatttacaaataagggaaaaaatgtgccagactttgtttctgtttggaattctgggaatatcgcctttggattatggacctgaaatcatgtcaccaacaggagatgcagtttgtgtgaacaaagggtaaagcttgaaataagataggataagacaggataaagaaccaggagagctttttaaataggagaagctatttgaaagcagaaaggagaacaggttcagaggataccaaaaccggagttatcacagaatgtttgtctgaccactcattcctgctgcctgccttggaatctctggaggaacttcccagaaaaaaaagaagagtggagaccactccacagacccaccgaacctgaagagcctaggtgcaggcgtgggtgtgggggtagaactgggaatcacaggctggagcccagcgagctaaggcccgaggcagctgaaggtcaaattgggaacatttcttacatcaaatcctaaatgaggttcatgctgattagtaggaactgtgtcaaataggtgagcaggcctgttctgggtttctaattacggtgtggctttcatctccctgagcttgttgctgcactgttgttcaaatgaaaaatgggaaacagacatgaaaaagagctgctcccctaagtgggtcagtgcaggcttcttccaccttctcccaccttgtttttctaaagagttacctggctttgttccctcactgatactcactgaggcatggcagccattcctttgccctctttggacagggcagcatgctgcccatttgggactggcagtagaatagtcaagaaattctttttacctttttctggcattcatatggcaaatgaatttttcgtgcaaaaaagcttcctgtgattgagtcggtctggtagcacaggtgacagctaatgcaccaggaagtgccctcaagggtcagccttggccacagcactgcatgaagctcacggtctggtggggaaggggagctgaagcaggcccttcacccctctcctaccaacacatgaaatgcctgcctcatctttcagcccaggacctggttgaagaaagatgcatatatagcaatcatcttttcttccttccttcacccatcaaatattccatgaacatctactatgagccaggcatcacgctacactcacggtagagcacgaatgccctagttacccccaaagaaataatatgtgggcgggtgactggagaagtcagtaactccttttaacatagggagagagctgggctgaataccaggggctatgccagcagccaggggaggcccctgaagaagcccagggactttggacatgaagttttgcccagctgagagctgaggaggattagctgggtagcatcaggaaggtgaaaccttctggacaaaaaatgacaagtgcaggatggggcaccgctgagggcagggtccctgtagagaaggaaaaagcatcccccgcaggcagtgagagaaggaggagggtgagaggagagacccgagaggggagccacggcagatggcccagggcctggaaagccctgccggtgacttcgggatatttcttaagggcagaaggagccaagttaggggagagcagacccaattcaggagaattcctcacttggtttcagttttgacaagagggtatctgggagcaatgcagagaccaaaggacctccatggttcacagctttgtgggatccccccttccttcttgcctggccagggctcctcagcggaggtgaggaggagttgagctcctggtttcatactatttgtgctcctccagtgaggcttcatttgtccatggattctcccccactggagtgagtgcagcaccctgtttagaagatcggcagaatcagcagatggacacccttcttcctttccatagacagttctcttctttgctattttccacctagctcttggaggctgtttctcatttggtctttcgagcagctttttttttttttttttttttttttccccacaaaatgttctttttgtcatcttctgcctgtcaccgtttttcatcctttttttcctgttctttttcatggtgtcctatttcactctcttaggcacgctctatctgatactcccgttctctcacgcatcgccaaccccgtttttcatgttgaccttcgattccgggcactgtgcacccgggctcatgcgtcctccaatttcacatttcccacagtcttcctccccccaactttctttgcttcctctcctcttcccctggcgcccccttgccagttgccatccctctgtttcacccagtgtccgctttcttccccgtgcgcagccctgtgcacccagactgcgattccctcctcccgcagctgcgccatccccggacccttcctgctgggctgcttctccacggaaggtccccatgggtttcgcctccaacactcagagcccacatggccgttgtagagaggataagataatcagatgcacctttttaattatttatttttcatttcacttaataagcacatcttgaaattgagctgcagtttcactcgtaatagatcatttcccttagggaacccacatccaaccccggttgaaattctctccgtgcgcagtgcagggaaggaagacactaggtttcaggtgtctttcttgagatccaaacatgttacgtcctaatgtaaagtgcgtgggtctgggagtgtgtgtttgtgagaggagtgtgtaagtgtgcatactttgtcccttctgtaatgtgcttgggtatagtagggtatttgtgttttggggggagtgtgtatgtgggggaagatgtgtatgtgtttgtgtgtttatggggagtgtgtatgtgagtgtgtttatgtttgtgtagggagtgtgtatgtaagtgcttgtgtatgtgtgaagagcgtgtatgtgggtggagtgttgatgtgattgtgtgtgtgtttgtggggcatgtgggggggactgcgtgagtgtgtgtatgtgtttgtgggtcatgtgtgtatttgtgggacatgtgttaatgtatgtttttgtgtagagcatgtgtgtgagtgcttgtgtatgtttgtgtgggaagtgtggatggggggagtgtggatgtgtgagtgtgtgtgtttgtggggggagtgtggatgtgagtgcttctgtgcgtgaggagtgtggatgtgatcgtgtgtgtgtgtgtgtttgtggggcatgtgtgggggacatgtgtgagtgtgtgtatgtgtgtggggcatgtgtgtgtttgtggggcttgtgtgagtgtgtgtgtgtttgtgtagggaatgtgtatgtgatcttgtgtgtgtgtgtttgtggagcatgtgtgagtgtgtgtatgtgtttgtgtgggacatgtgtgtgtttgtgggacctgtgtgtgtgtgtgtgtttgtatagggagtgtgtatgtgatcttgtgtgtgtgtttgtggagcatgtgtgagtgcttggtgggggaggaggtttctatctgtctatgagtgataggcgtgatggacatgtaacacttagcccaagtgaatgtgaagaccacagagggaaaagggaagagcagctactcaaaggggctgatgatttacctaactctcccctggtccaccccaagagaaggatcggttgtgaaagttccaattactagaagtgtgatggccactccaccagccacctggagcccagtggaaggagcgtctgcagagaggccctgcctgccatttgttctggcccagccacgggcaagcatctcaggaaaaagggatttcctggaacagtgcagcagcaacaggactgaattgtgggttgagtcccgaggatctcctctggctcctctaggcccagaggcctcttctgctccaggctggggtcctttcctagggcacaatgactcgggtgcccctagctagtctagtcatggaagattgtaaatatagcttctcatgtcgtcgaacttttagaggcaactgtaggaaaacagtagcaggcaggtttcatcatgcaatgataatgctatttttatgtatagcttattgaaacctgattatgtggcagccaagaactagatgaagctcattatgcacactgtgtcatttaatgttcaaacagccctgtgcgatagatgctgtcatttcccttcctttagaaatgaggagaccaactaacccaaggaaggttgcacattggtaagtggcagagccagagtttgaattcagaaagtctgactcttcacagcctccctcaaacactaagcttccccttatgagcaaaggatcaggttaacctgactcaaaggactgtatcccaattgccagcacaggcatgggctcaagttgttgtagagacagaagcctccttggaggccacctagccagtgattctcagctctgctgcgcattgagatacttggggtattgttaggcaataccaacgttgaggtcctcctcagaaattctgactcagtttactgggggtaagcccatggtgtctttgtttttttttttatttttactcctggatgtttctgttgtttacccatgttgagaaccactgtcctaatttacagatgggaaaacatgaaactgaagaggttagctggcttatccaaggtcatgccgctggttaagcacagtagcaaggactaacccagatctcccatctctcttccagggcgctttctcttgccccttgatgaaagacaaatctttccttatgtgtgtgagggaacaaaatacaatatggtgggtaagagtttggactgagacaccaaatgggttggaaaaatcgctgtgtaatcttgggttttatgtgttctctggctttgtttgttgttgttgttgttgttgttttccatctgtaaaatgaggaaataataaatcctgtctggcgggattcttgttaggtgataacatgagatgataccattaaaaagtgccataatctagctcagcatatggtcattgtttttgctgtgtggaaaggaccatccattagacatcagcctcactgggcattctcatgagctcagatggcaatagtcagtaacatcaactttgcgttttcaaaagtagcacacaattaaagaatacatttctttatttgactatgaactcattaaggatgatgtgtgctatgtaaatgcactctgcacaagttgacgtcacctgtggaacctcggtgacgatggctgatggaatgtctggccattggtttggctgaggtagaaccagcatctaaatctactgttgccatgttgtccttctaacttgttgtcacaaatggggacacttgctgttcttccacaagttcttctcaatctcatcactaagacagatgtgaagacattcataatgctgatcacgggtacatctctgaccctgtgaactcccgaggcctgttttccatgggatgatttacatcaggagacacgattgtctccatcactggtttcaataccatccaacaaagatgccatggagattggagcttactccctaaggacattgtctctcagctcatgcaaacgctactcttcctgagtttccccttgcctccctggactctgtctagacggctgttttattctcagctccccctcccctgttggcctacacatagtcttctgttcttctcacttaggctacatgctgtccagtgacccacccaggcctggggctttacctgcagtgctttcacccatgatagtgatatctttatatccaacaccggcaaagctatgtttgtgggaacctaatggaatctcctctcaaaagtggcacaatgtattcaaaattaaacaaatcatcttgccccacctcccttaccaccccaaattcctcttgcttctgtatcagcagtcttggagtggtaaaacccaattctcaagatagatagaggactagagatcgtccttgatttatttctttctgtagcactcctcattcagtcatctgttcctatagatgcccgtcactcacgattccccatctttgctgtcatggccttgcttcagccatttatcccatttacctaacttattgccttcctacagcctgtgtcctccactgtgcatcctgtgtcacatggtcacagtaaaataagagcaaacatttattgggtcctttccatgtgacaggtactaggcttaacttacagaatctcatttaaatctcccaacaatcttaggtagtagatatgagtgtgatatgaacaattttaggtgaggaaactgaggctcagggggggtttagtcttgctgaagatcatccaaataaaagatggggcttgaacccttatctactattggaagaagcccgactgtggggctgttccatccctaagaggctgagctctctctgctttctcaaaagcatccctctgctaagtgctgcttcttgcagaggtcttcttcttttatttctttttgggctctcctgtttccttggaaatgttgatttcattgcattttcctaatatttcatgctttaatttaatttatttgatactactgtacagtgccttgagcacctcagaggaagtgagagttttataaataaaataattattacagcttgctctgatggcagcccctgagctatttagtagatatatcaattactctcagtgttgaaaattttcacctaaagctctttatggcccaagttttccttggcttttaatgctctatcctgcttgttgtagttttgacacaatcatgtagcacttttctttactatccccatcagaagtgaacagacagcagctcagcaaaagtgccatataatgtattctagagaacatgacctagttttcttaacctttttgaatcacttagttccaggtgtcatttactagacctataatgtcagttttgcaatgagtcaacccgccttgcccacctcatggtctctattagtgagacctcattatctattagtctgttgcagaaacctcacccacgataatctagagatgggtatgaattaaccacaacactgtttggcacccaggatttcaggattctaaactacaaggcttatgcagacaaaatgtttgtcaaaatcttgaaaggaagtgaagccccaacacatggaggagggtgagtggattagagagtgcagtgtagagaactctctaatgaaattcagttttcctgcagctcagaatgctatgcaatccacatagtaattagagagaactgaggtaattttgcattcctggacccagtattctcaagatgcattaatcagtcagtggcaatttgcattcctactaagtgcaagccactgttcaatatgctgcttttgctaaattagcacattcctccacagttcctcctttcacgatgagtgagtctggcacatgtcataagattccacctctcaggaatacacctgaatgtggcactgaccatcattcctagcattatggctactttctggatcctgcctgcctcacaatctcatagcacttcactagcaagagatgtgagaggaccgttgtcatctgtttagtgttttagaggcatgttgaagaattcagaggataaaccaatggtcaagctaagatttctccctggacatctcccactcatgcagttagacctgactttcctcctctcacttccatcatggcatatttttttattctacttaaaaaagatacactttattctatcctattttactctgttctatcttattcattcattcaataaaaatgagcttagcgcttgctgtatgccagttatatgactggcatgtacaatgatgagcaaaattgacattgttctttattttttggagtttgagttcttctcttccttttgtttttaaacattttttatttgttttgtagagatgggatcttgttaggttgcccaggctggtcttcaactcctcaagtgattctcctgtctcagcttcctgaggtgctgggattacaggtgtgagccaccatgccaagtcttctcttcctctcatcttgacttgcctccctctcaaaattctactctttgtaatctgtagttgtattaaggatttctaaagaagtttcctcattaaccagaaacaatacactgtgctgtctccattttgtgttttttagcaaacaaatgggagtagccaatctgtccattataaatgagttcattcccattcaagcaatggctgtcatgtatcttgcctgaggcttcttatgttatgagcaacatattggcttcagttgtctgtactttttcctagctgcacagagatccttagatgaagggaaggcacaataactcaaaataatgtattgtattatacatagtagtcattcatagttccaatgacaggaaacacaatgagcttgttcaaggtggatatgtgtaaccctctcaccaggccaggtagaggttgttagatgtctaacaactattcttccccctagccaaatacgaatctgaaacaaactatgacccagatatccagaccagaaagaaacagataggatgaagcctgttttgcccacaacgggaagaatcacttccgatgaaaaacgactaactggaaatacttcaaattgctgtagagagtgcagtgtggagaactatctaatgaaattccgttttcctgcagctcaaaaatgttttgcgatccacataggaatcagaggacccaggtaattttgcattcctggacccagtattcacaagatacattaatcagttggtggcaattggcattcctactaagtgcaagccactgttcaagatactgcttgtactaaatatgtctattgcactgcacttcatctgatgatgggtgaggcccaagcaactcatcagatactacctctcagaaatacatctaaagagggcaaatcctaggcccattcttttcctctcatttctccaaatagcttgtgagcccagttgaccttgcctggatcaggacaatcctgggttgctggttaaaggttgacttggtccatttgcctctactctatgaggtatctcatatcactttcattgtaattctgtggtagccctttaataaaaatggccagcaagcccacaagataacagaataggaatcaatgagacctgcaattgtctgcatgccagattctcctgtcagcctggcctccaatccatcctgccaactcaacctcctctgggactgagacgtttgaaaacagtgcagcagcctcatctcctgggcagtgtttttctccatcatttgctttattaaatattgattttctgttgcattattaaaccttaagtccagagcataaattctgggctgatactttaatctgactcttctcatttttttggcttttagaactgattttcaggccagctctcctggggaatctttaagtcaacttagggccagagacaaacctgcctgtaggaaagggaggagcccggagttgagaaggagcttgccttgccagtgcactataaataaggctgtggctctgtcaagcagatcttcactttacacatgtcttagacacagaggcttatgctccctgggattcaggttgtagtgcaaggaaggacttttagattcccaccaccaaaactatcgagtaggcaaatggtatgcagaactgattttagagctctctagatattatcaaactcattatccatccaccccctccttcttttggtttctaatattcctaggatttgagtcaaaggttataatcacacaggcatttggatttccactcactttgggcctctggttcattcttgttttctcttactgtctcttctctctaagggccaatggttgagtaatcagctgtagccatccattataggatggagccatcacacactttatgaaagtctttctgagagaggcaggcattctcaaccagtcatattagccagagtgatatctaggtttaatttttttacttttttttttttttttttttttttttttttttggagatggagtctcactctgtcacccaggctggagtgcagtggcgggatctcagctcactgcaacttctgcctcctgggttcaatcaattctcctgcctcagcctcctgtgtagctgggactacaggtgcccacctccacgcctggctaagtttttgtgtttttagtagagatggagtttcactgtgttagccaggatggtcttgatccctgagctcatgatctgccctccttggcctcccaaagtgctgggattacaggcgtgaaccactgtgccgggccaattttttacttcttgaatacttcttagactggcagtatcattgactgaggctagggttggtgattttaaagataagaagcagaatactgacagacaagcatgagaaaagaaatgcaagtcaacatgtatggagcttctctggcaggactggggtatgttgctgtctacatggatgtttgcagagagctgtgcctatctccctgtctgacttctgttcatcccatctttctattcagttcaccccatctttctcctcagttatcccacctttgtcttttaggtcctgcatctccagaaatctagtgttaggaagttattccaggacctagcagagcctctgtttaggaaaagagtgaatttgattcgctcttcactctgggatggagagggaacacaggtagctcatggggctacagaaaccagcaactacaaaccttcagatgctgtgagccaagtgctgactgagccgggatagccacatcaggtgctgttgaaaatgattcttggggaatatttgatagaaacaatgtgaagatcagggtggaagaaactgtgtccttcattttcaccaatactcttcatgtcaccaataaccataggcctctaaagaataatacatgttctctttaaggtcatggggattccagatcatagatcttcctccaattccatttccaaagcctgaattccctctacaataggtatacagctagggagtatctaccatttatttgaacactgtcagtgatgagcaactaactacctattcatctaggtcttacttcctttagaaaagctctattagatccacatatacacctctctccctctaatatctacctcttggttacttctttataaccacataggataagctgaatcttttgtaatgataaaaaaagtccttggcatttaattaagagctatgaattttgaatcttactgtctatgtaaatgtctacaagttataggtcaaaatggctgaatattggcagttgcatatgtttcaatctaatatttaatttctcagagctccagctttctcatttataaagaacttgaatataaccactcatcagtttattgtgagggggaattgaaattaggtgggatacctagcattggaaagcattcaatttaaaaaaaataaataaatttaacaactatttactaaacgcttattctgtgtcaggcaccgtggcaagtgttgggaataggaaaatgagtgataaatggtccttgacctcatgatggggattgcggtatttgaggatgcctattgtagtccttaagtcttcccttcttctgctaactaaatagagcaagtatcacctgcatttgtctttgtactcagctcattaaattgtagttatctcttcacccaaaagttatacattttggggtgcaagaatcgttcactaaatgtcacatgtttttctccataaattctggttgttggacctgtttgtagttcttcatctttccttgtctgaaagattctggtgtcttcacttatctcttcagatgttagctgacttttccccagggcagcacaagctcaccgaggtcaaacaagcatgagcatgctgacttccattcagtcacctctgcacgtcctgccgctgatcctttatctcctgtcttaatctgcccaagctgctatgacaaagtaccatagactgggttgcttattaagaacagaaatttatttcttacaattcaggaagctaacaagtccgagatcaaggttctggcagatttggtgtctggcgtgggctcacttcctggctcattgatgacgacacctttttgttgtgttctcacatggtgagagtggtgaggggtctctttctagccttttttataacgacactaatccgattcatcaaagctttgccctcataacttaatcacctcgcaaggctccaccctcaaaaaccatcatcttagagtttaggatgtcgatatatgacttttggagagacattaacattcattccattgctttgtcctttcacacacttggaatgcctctattttctctttgattcttcactatttctgcatattcaatttttgtaatgattaaaaactcatctgaattgcaggaattcattggaatagttcaagaagatttattggatagatagatcagaatttatggaaacaaatgcaggaaaaacagatgagccctgtctgcaggggatacctctgactgctactctctgcccctctcttgttgggactgtgtagtctccttattcatgcttctttctgcaaatctcctatggtggtctcttcaatctcttacttggggtttctctaatccccactaacttcatttcccatgtggccttggcctatattggtgctcattcagacagcttgatagaccacagtcaactgactccacattggtgccttaaattccacatagcagaacaacaagtcagactgccttcatttgagttaagtgaccaaaatgagttaagtgagttaagtttggaccactcttggtccaaacagctattgttgagatgaacatagagatcatatgatacatgatgcgatttatgtctattcagtgttctgctaattcagaaacttggtaaaaatacattattaccaattgacagatctcatacagagatgtttgataatgtccacatagtcaaaaccaacgatggtctgcttgaaccttctctgcctcctgtctagttcttctcatctacctcactcattttctggacatatccattgccaaggagatgtctctgcccaagaaatggtctgaaaatgtgttcagaacctacaagccttctctttaaaggacaggatgtgggggaaatgcattcagtggctggaaatcaccctcacttgaaatgctttggcctgtgaaagaaggagactattacaatctactgaaatgtcaataattaaaagccaaaaaagttattggaaaggctcgccatgattcatgccaactcccattctccccagcatgtagcctcacaagatatataattttccatttgtgtatagtggagagttccaggtcacataggaatattgaaaatgggtgtaggacccagggtcttcaggctatttctgtctcaagttattttgattttcccttttgatgctgtcagaaactctggacatgatcatttgtgctggaaaaagcacaacttctgccctttgtttcgatcgcttttgccatgtgtgattggtgaatttgattgctggccacagaaaattgcatttgtgtcgggagcattctgaacagatcaatgtaggaggaaaccaggcaggatcaattgtaataccaaaggaccagtataaaaagtcatgcaactcacatgtcatcctatagctctcaatgtctaaacatcacatggatttttggccacaattcattaattaaacctcacaatatgcagtgaggtcaagtaatgtttgatgctagacatctagaagagtgggaaataacaccatgtcaatccaactgtctttatgcagagaatctgcaaaaagtgagacaacatgtaataatacaaataattattatagtcactccatatattttccaggggctggctatgtcctctatacacatttctaattttaacttcaagagaagttaaatctatcatttctattttatgactaataaatcaaacccagaagggttaaataatctgtgattgtccatgagtgtgcagcgaagtggggtctccggaattctgttctgactggctctgaacgtcatgcttttaaccgtctctatttattgtctttgtgtttttaaaccacagtgctatataccattaggaataagcattatcattgctgccactattcttgttagtttactaatactgccagatgtgtagtaaactaagtatttcctcttctccacaaagggatgctagggttctagggaggcagttattcatgtgattacatctgtaatatttgtatgcatccagcttgatcaagcagtttccctgtctattatgaaaaccagcttgtggaggaagtagggcaagtatcattcattccatgttccaagtgaagagagtgaggctcacagattgtgacttgtgcccaggaatggagagtggagctaggacgagaagtcaggcctcccagctgcagagatactgttgcttccactctcttgttcttctgtaacaggtagcagttgtttttgaagatatcacagcctaaatggaattaactttcttcttaaaagttggactgtctccagcctcccactttcttaaaaatgtgaaaaacaaacaaaaaccagttcagaacactttagccaaagagtgtgtcctaaatgagtgtgtcctactctctttaggcttggaccatgtcttatacacctgtttggtcctatctggtccctgataggctgccttcaacggagggaagcagtggaaaaagagcttaactgactgctagaagacaaaatttatgtcttaatgatacttaatgatttagtttcaacactgtttattagcaaaaaatgtttagtgatggcatcctacattctaggccctcactgggcactgagtagctgggcaaacttatacaggacacttaagttttctgggcctcaattctgtcatctgcaaaatagacttatgaatgcctttttccctactgcaaagagttattgtaagaataaaattaaatcatggaagtgaactgcttctataaactaatgacccctgtacttatgtgatgcattattttaggctctaaaaaaatcgtaaatgtatcagcaagttaagaatgtaccttgctacatgccccagggtaacagaatcgatgctagtgcagtgacttcatggactcagtatgctgggtgaggagcggactatgatgggcattgctgtgtcgcctctttctccctcttatggagggggctgccttcagcagggtggagctgctgctctttgtgcagccattctcttggaactgctttctctgagtggtgtgatttttgtagcattttcttcctttcctttctctttctggcaatggctctttgaaatattatttttgcttcctcgacggctgggctgtataattgatggcctctcggggttgctggagtcgtgcatttaaaccacgatcgccttggattcaacgcctcagagttcattactttttgaaatgcttcacgtctgtttgtgttcagattattgttgctctggagagagaggttattgtcaggcaggaagaggagtgtggagcagaattcatcataatcacatgctcttctcttctggacgaatatttctgggtaacaagacttcatatttatctggcatggctgttctgaaccagggaacccaggaccttcactttccccctgcagcctgctggagggagtttagcagcattcggtcttggaatgtgggaggctgctgctttgcaaataaagtgggtaataaaagtgcccagcgctcatactagagaatgatttagtgcagaatgtgtacatgtaggatttttaattaaaggtttggggtgcacttggttctcagcaatggtgttggtggagggagcatgctctctccacttgagctatgatcttctctcagttctgcagtggtcgtcccatccttcccagctcttgtctctctgtcacctcatggtccacccacaccattatcactcatgtatgtccacaccctggctcctgctctccacgctgcaccagctccataagcattagcaccccaaatttggtaaacccaaacaagtttgtgtaaatttggaatatactagaacctagtctatatggcaaatgaagaataactcctctaggtttccagaaatggagattcagagttgttggggaggctataactgagaacttttaattcagattctgccattctgtgcatttttattctcagactaaaaaaatcctacccaccccccttttttttttcagacagagtctcgctcagtcgcccaggctggagtgcagtggtgcagtctcggctcactgcaagctccacctcctgggttcacttcattctcctgcctcagcctcccgagtagctgggactacaggtgcccgccaccatgcctgggtattaaatcccacctcattctttaagactgaaattatccaacttcttgagcagccacccttagaagttccctacccccacctcattctatctcaggaaaattctcgggttccccattgaacttccagagctccttatttgtatcatggctgcaacattctttacattttttttgtaattctccatcttatgtctgttctcttttctctcactgtatctcttgaagacaggagctagattttttgtttgtttgttttatttctgaatgaccaccatctagtgtggttccaatatatgcttgacactaaagaaaggttcattgaattaatccatgaaagaattctgtttgatcaagtcacatttcgattttcctgttagttaagtgtaactgtatgtggaagagaagcagtgttgtgtgcgagggacacgctgattcatctgtcctttggaaatacacacagctcctcattccagagggacaggtagtcagatacagtttgttgggtggggctacttatacaagaccaggtggtaaaaagtaggcatttctaaaagatgggtttggtcaagtttggtcaattatggatatagaagcaactttccaggaaaaaaaaaaagaaaaaaaaaacctgtttgagaaaggtttttcatctcaatagcagatgaagtacttataagttgaaggcagtttcttttctttttgcaacatagcaattagaagatattgtcacatcttgtcatttgaaaattctaaattaggttatgcatgtaacaaaaatatatgctggtgtttaacaaaaaataaatatttgagggactattttctgtacatttctcaataggacaccaagtatagatatcctctcagattatgcttgacatgtgttattatattcatatatttcttagtattctgggggtgaggaaggattttagcctctgtgaatcctagttgagtatacatgcctaaagttttttttttttttttttttttttagacagagtctcactcttgtcacccagtctggagtgcagtggcacaatctcggctcactgcaacctctgcctcctcagttcaagtgattatcttgcctcagcctcccaagtagccgggattacaggggcccaccaccacatctggctaatttttgtatttttaatagagatggggtttcaccatgttggccaggctggtctcgaactcctaacctcaggtgatccacctgccttggcctcccaaagtgccaaagtgctggggttacaggtgtgagccgtgccgcctgacatgcctaaagtttttattgttactttgttactcaaacttctccttgacacattacaggagaatgctggattgcatggattataacagtctaaagctcagcaaagtgaaggtgattatcagcattttaaatgctgtgacattttgctgccaaaaagtaattgatttattaaagacattacaatacatgcatgattcaacataagaagttcctttgaatttgttcagtaccaaatcctgtgggagactatttgctttcagcaccacggacagaaactctttttcattcagattcagttggccttacacaagtaaatattatagctcagcagtggcactccaatccactggccacagtatgatccaatagctttaacattccaactgatgggtactggaatgttaatacattgttttccacttattttgccacaaagtggaataggggacacaagtggatgactttataatgcattattattaccttcactttgctaaaaatgaaggtactaatccataacaaatcagatgaaatacataacattttagaagatgactgattttttcctaacaagcaacttcttggcaatgctagatttcaaaacactaaataagaagccataactgagttcagtgattccacacctgatcactgaaccaaagagactaatgaaatgcctaaagctaataaaaaatcttgttgttgaaggcaatgaagccccaatggggcatggggtaaaatactgaaggatcaggatcttcatctgtcgtatgactatgactaatgcactcatcctgactgggtaaacctctagttaattcccaattgcttcaggcaatggatcaaaacttttaaaatacagggacacagtcttaatccagagtactgtttgcttccttattcactgttgattataaatgttccaacgcaattttatttctcctcactcacatgacaaaagaaatggaaaattttgatggagtaattcaggagttttgctgaatcgctcacatgaaattggattataaaatatatagccacattgatgcccaaattaaaaatatttatagaacacaagctgatagacgtcttagataacgtgaagtccaacctgtctccttacagatagggaggctggctccgcaggatctcatctcttgccttaggtcacagagataaacacatggttgggaggggcttattgcttgatgaaacaacaaagaagagaaggaaagataaactttaataatatgtaagttattttgtttccatttttattcagaaaagctacaaggcttcctttttactcaacaaaatgccatataagtaaacataattcccactttgcctttctgtcaggaggcttaaaaagaaatttccagcctaacctaaaaatttatattgacatttatggtttccataagaggtattctctttttccttggattttattttatgtgtttacccttttgttttgtgttttcattataagattcctcaaatttattggggaaatggtgaaatataaataattatgaaaagtttgatagacagccttttcaaatgtaaagtaatcatatataaaatatgacctggacaattgacgccttgtgtattttttgggatcaacttggctgtgaatcatttgctcgtcttaaaaattggggatgggggaagaatgttcatcatttatctcccaagaatgcatgatgaaggtaattaaaaatgaagtgaaaaagaataagaattttattagtgtagatataggttatgtaagagaggaagtatttttattcagaacaaaaatgtttgtaaaatattaaatgaaaatgtaggttaatagaatttagcatttaacttgtcaattgtattaatgaattcaaagcaaagaaaaacttgggcgtttcagttattcagttcaaacaattacattaattaagtaagcgggatttacttttttattcctggtcttatttatttttccgttcatttattgagtacctgctatggtttcaggcactctatactgtctgggtattcagagataaaagagaattgctcttctcaaagagttttcaggaaactccaccctctgctaaaatataacacaatgaactgctgcaagatgctggggaaacaaaaaagaggatcaaaaccaaaccggatcaaggtggagtggagcttgaggaaggctcctaggaatgagtctagatttaaagggctaagataaatttgttatgtaaagattgagagtctgccaatccaaagtaccctaatggatgcacaagagaaaatcctagggagagaggggcaggacacagatcttaatctagtttacagtgaataatggttgaaagatggaagtgggtaggcaaaggctctggtgtacgtgtgtgtggagagagagacagagacagagagaaagtttgggtgcattatggtaaaagataagataggagagctataaaatggggcagtccggaagggccttgccttacacctccagttaaggagtttacatcctgtgaaatgaaagagagtacttcaaaatgttataagcagatgagatttgcatttccacaaagatccttccaagtcattttggaagacggtttgaagagggacgaagctgacccactctattatagtaattcaggggaacagtgtggatggcctaaatgtagataattagccttgatgatgcaggagataccaagtggaatgtatctttaccagcagggactcatggggcttggcgactggtatgggaagaggaaaacttgaagaagaatgaggaatttccttgactggggggtagcatagcatagcagtttagcatgtggacactgggagcagactgcctcttctaaaacctcgctgtttgatcctggtatgcttcttaacatctcagtgcctccatttcgttattagaaaatagtgtaacactaacaatagtaatgttatttttcatacattttcagaaaattattggaaaatcatcaccgtttcttaaatctctttaaaggcctatgggaaccccgtttgaaagcttttgaaatatacaaaagggattgattgtctatggagagaaagtgattcattcaatatgggacttcacattcactttgtattgtgtattcacagtctaataaattattacataatttgtgaaaagatgaaagagaaaaagaacatcttcagagaggatgaaataatccaatagagagatgttggagatgattagtgaagacattcagaaggtagagagaaactgacagtcatgttaagtctaacatgactttcaaagaagctactaaacagtgatggattattattaaaggcagagattagccaagaagtaaagcaagcaacttcaaaggaacaagcaaaatgggaaaaaaaggcacttcaatccttaaaagaaaaggacaaatgatagaaatttttatacaactgaatggcttcccataagcaagtagctctggtcttccctcaagtctagaactgcaaactcacaggttttcaagtctagaaaagtaaaaacaaaaaacaaaaccaaccaaccaaccgaacaaaaaaacaaaaaacccacaaaccctctcaagctctcagacttttctataacttgtgtcctgggcagctgggtttaaattccatcaatctaaggacctgagtttccaaacactataagtctaatatgattaccaccagagttggtggttcagctcaccacctccactccacccagccttagagaatgaagaactaaaacccggtgaggctctcccatcagattttctttccattgtattcgctactaccagccccaggccaacataggccccttcctggaagaagcttcaggaaaaaaaaatggggagaagataaaagaagaaagaagtgatcaatttagttcatcatcatgtatgtaaagtcaataaatttaggctatgtatttaacttaaggatctcagaataagttatacaagtaagacaagtgattgtgctcaggacacaagcaattgcctattgccaaatctcatggcattttttcagtactctttctgtcataattgatgcagttgctaccactgtccttactgatgatactttctttaccaacttttcatgaaactactccctcttgactttcacccaactctcaccactccatctcagtttcttttctttatccaccttaatccttctcatgagtcatacctgttggctttcctctgggttccacatttgaatcttccttttatgtttttcctaggtgatgctactccatcatggcatcagcatgaagattatgatttaggcagtcatcctgctgtgttctgcctcatttcttttctaaattcccaaaggattacaagttgtctattgagattcttagcttttatgtcctgcagacaacttgagctcagtgtattccaaactgtttttattatccttggtacctaaccaggtttttggtttcaatcaatggggattgattcaggttgacttaacagaaacaaggagttgactaaaaatatgttgtataactcatggaattgacagaggtttgattcaaaaatgggaagggggtcaatacatagaaaaattacaatgcaggaagtcctgccagggcattgcatccactacagcttaatagtggcactgatgttggcactattgaaacactggcatttgatgcctcttctgttccttctgatacctctgaatgctggacatcccaacaggagtgaattctaactgtctctgtatctttgcatttttaactatgtatgcaaattccttgaccagagcatccagtagacagagaccaggtgacattcctatgctgcacctattagagtactataaggcaagtctgaaatcttatcagatttcaaaatggagtcacactatctagtttattattattattattattattattattattattattttaatctaggaagggtgttccgattctgggtagtagcttaaaggaatggcaaaaacccactccatatttcatgaggaaaccttatcttcaaccgttatttcccatgttaactaatgccaccaacatatatcagtcaagctagaaacctccatcatttgctagtttttctttcacttctttttaacacacctgttttgttagtagtgtttatttaagttcctaaccttacaattctatctaccaaatattcctttcccttgttttctattctgctctttccactcttatagaagccctaggtcatgactggagaggactttcatatttttaaacagtgatgtactagctaaggttgcatgctccagtgtctgatcacctgcatttgtatcaaactgcagatcatgctcactcattgtgcaaccctgggcatattatttaatctctctacgtgtcatgtataaaatcaggggaataataataatacctgccacacagggtctctgcaagaacaaattgaggctgtaggtgtaaagcattgtgtatgcccacaagcaatgtgcacacaatgatggtaaggtgacactaaaactggaaagtaataatgaggggtgaggtggtgaaaacagtaatgatggcagtagtaatctggtagctatctctaatacgtactctcttgaggatgcagtctgcattgctgccagcattatctttccaagcaaatctgcttcgaatccttggatggtcctcatttcctatggaataaaatccaaagtctttaacaaagcatataaacttctctaaaatggggccccaagttatccttttaccatcaaattctaccactgaccttatagtacaggaacacagaccacctcattttccaacattttaaagattttacttacaggtttcacatatgctttctgcttcctagaacactctcctttgctgccttggaattcacattttctgtaaggcccaaacacatggtgcctttctttgcattttcctccctgataccctccctgtgttcctgtcacactctatatttgcatctcacacggtgctgtacagtcctcattgcatatattgtcaacttctacacctgctggcacacccttgaacttaatgttcctatcttacccactcccatctctgttacataagaccagcacatagtagttgctcagggaatggttattctatgactgtaataatcaacacatttgtaatgactcttcaaggacccagaaacctggagaggcatgcccaccaacttgtcccagattagttaaccataccccactggccacatttggcagtgaccaaacaggctcagcatttgagggcctggactcttgatctctgctttcatcgtttccactttgtgcttggcaccaggcaccatggagaaactttagcatgataccgggaagacacagtcggtcatttttttctgaaggaattttcatgccaccataaactctaaattagcaggcatcatagttatgagactctggagccaaatttgcaatcaccattaagacaaagaggcaaaggactgtgcatgtcccagcaaggtattctaaaacagaaatcgctactccctttgacaacacaagtgtcatctgaaaaatctccatgttctttgaaagcaccagacaagtatatcttctctaggtctacctggtcatagaaactttagactcaccaactccaaaaagtaaagtgtggaacttggtgtaaagtgcttccattcctgtttctggaacttaatattcaatacaaatttaggccatcactagatttttcaaatgacacctgtgttgttaaaggcagtagcgatttctgttttagaataccttgctgggacatgcacagtcctttggctctttgtcttaatggtgattgcaaatttggctccagagtctcataactatgatgcctgctaatctagagtttctggtggcatgaaaaaatccttcagaaaaaaggaccgaccgtgtcttcccagtatagtgttaaagcttctctatggtgcctggtgccaagcacaaactggaaacgatgaaagtggagctgaagattttgtatttcaaacattttactaccgtttttgagagcctcttttgaaagcagtgagtttacgggggtgtccgtagatcttcctgttccatatgctgtgtttacccacagaagagggaactttccctgacacttctgcctcctcaccaaggcagagaaaagaggtcctctctttgctcctttgctctgttctcccgggctgaggctggggatccagttgatccagacagttactggctgcctcccaagcaagttcctctctcagctcatcctctttgtgcttccttggcacagctgtggggggcagtgcactgccccagttcctacatctcacacccatgtgagtgctgctgtttcttttaagacttttctactgactactgtataaatggatcagattggcttaaggtggagagctgcttcttttttcttgaggcaggacacaggaaattctttcctgcagacccccacactccagtcgtccggtcctggtagttaaaggtggtgaaaccctctcattcacctgaagcctggctcttccctcaatggttcagacctggaaggaaagaccagagaaagactaggatttgggccacaaagcttcaaaactgcattttttcttttaaatgtaaatttagattatttgtaattacacaagatgaatttgatgaacaatgagctacacaaattttttgggaaaaataatattcatttctaggcagttgaccttcagtcagatccacacagcgtcatgaacgtaccatgtcattgtgaacctatgctacggcttcatggcgtcagaggtgccaattcagaaacggtgtggctgggccttctgctttcagcttacctttttttgttgttctaatttttcttgatttggattaatactgtactctgccacagcacgctggattattttgctgcgattgtttataaggagtggcatccttatgagggtatttgatctgttattatcccactttctcttgaaattgtcgtatctaggctcagtgctatagaaatagaactttaaaagtgaaaaacaaaacaaaaaatctcactgctggaagacatttcacactgaaacatctctttctgtgtcttgctttctatcactgtcactctcactccccccatatgtgtgcacatgtacatacatgtgaatgtgtatgtctgtgtgtgtacacacaagcgaatatccaaacagacatttatgcacacattttcttgagatatcaaggcttttatgttccccataatgtgtgcctcttctctcacttttctttcttaagggaggaaattttcttccatcagaatatcactctgagataagccctgcatttataatgcacacaaagactttttccagtacttgtctaatgagaagcgatgcccaaaattagagcttgatgccttccaattatcctattgcacatgattttgttataccacaaatagttattttcttccttccccaacagctacataaatgggtcgtggtaatccactccaaaacaaatggctcagtattgctaactttgctgcatataacgcaaatctctccattaataaagaaaaagagtgtctggtcatttcataataattttaatataattatttttaaaagatatgttggtttaaaagatatggaggagggttggaagttagttctcaagagcatagctttcatgaaaactgggagagagcccaggatggagtaggaagggggctgcagggctgggtggcatccattactttcactttatttttgggctcggattctttaacgttgaccctgctttgtgctcaggcaaataatgggtcaaggcacttcaaagcagacagctgctctggacttgattcatcctaatcagaaataactgccgcccttgcctattcatcgctttcccaccctagaaatgggggattacgggaagaatgaagtcaaatctaaagagttctgccttagatagttaagaggatgattgaaatcaataaatcccaggctttcgggaagcccacttgattccaagtttgctaaagacggaaagaaagaactccaacaggagcctctggtgaccagaactccaccactgagccactgcggtggctctctcatcactgggacttcccagcaggagcctaagtattactcgattccacctcattatggtactctccccatgaggagtgtaagtcacaatgacaggacaacaaaatggttgggagacacagccaccaagggaagcaggcagtggatggccagcccctatgaatacactagcttgcctctttccagcagcccaaatctccttggagggaatcccagccagtcttggatctctaacgcagccttctctttttagtttgactggtatcccagctccccgaggaacctgcaggccacttgaaattcatgatgacagcagcagataaagactccatcttatcatccacgtggccactgctttagacagcctgctttttaaatttttattttttaatgttttgttttgttttgaaatgttcgggctttcaggtcatggcattgcagccattcctcctattttttttctttaacgatatgtaaatactttcatggaggttgtcttatttggttctcagaaggacactataagacaaggcagttataataatttcagttttataaatggagcaaatgaaccctaagacatcaaaccactggccctcaaatgcaccagggataggactcttgcaggtttgcccttcttccagttctcatcccattaccgcttccgagccccctgtggggatccggatgatttcctcaaacgctaggtggcgccctgtggagtgcccccatgctcacactttcagagggggtttgtggcagccatagctctatgaatatgtccattcccttgactccgtgtctaggagaacattgtctacatctgagtgccaggatccacatctgttcaattgaatagactccactgaatacatcagagaagcagggccagactggctacccatgccctttctaatctcactgttcaattccttggggaaatatgctactttgaggatgtcttcagtgccttgcttctcttttcttcattttcactggaaaggaggttgctcagatggcgtgtgtgtgtgtgtgtgtgtgtgtgtgtgtgtgcgtgtgcgtgttttaaggattgaatgccctgaaaaaacaagatgagacctagaagtatgttcagcaacaccatatctggcttctctatactccccttcatatttttcttagctgttctgttttagttagcaccaatatagtgctccccacccacgtatccctttagggtgaaacgcctgctcagtgtgcttgggaaaggcagtatattttaggcagcctgataaaaggctctaatagccccagattaatgcattcattcctagccaactgaaggattcattacagtgctcaggctgaggctcctctgacaaatttgccctgggtaatgagccattcagcagctaactaccctgtgctgctggtgacctccagaaggggcagtgagatggagctgagcagacacaggtggagtacaaaagaagggagagatttgaggcatctctgggctttggggagcagttgtaagagcaagaaggtgcttctgagaccacatctgcctctggagctatgacaggagcgtgatagggtatgtggcgcctctgtactttctgagcctaacaagtgaggttcagagcaaggcaatgtaaatctctgctttgaaagtgaacatggattgggtaactaaaaagagagtgatacgtaggagaaacttccaaagaattgcaatctgtccctctgactaacatgtctacgtggagacttccaaaatggaaaatgagacatagcataacagaaagcaagaaagcctcctaaagataagctagcccagcagctctgcagagtatgactttaccctccagggaacatttggcaatgacttgagacatcctagtttgtcacaactctgtgcgtgcgtgtgtgtgtgtgtttgtgtgtcagggaagaaattagcatgaagatgctactggcatctagtgggtatagaccagagattctgcaaaacatcctgcaatgcacaggacagccccacacaacaaagagtcatccagccccaaatgtcagtagtgctgaggttgaggaacccggactaacccaaacgcctccttttataggagacaaagctgaagacttgagaaaagtgcctggctgaggggccagaaacctgtgtcttgtctccctccaggccatgcaaggcttgcttttgaatgctgtcctggacagtactttcagaaatgaagaggttccttctcctcccagactccagggcacccttcccagctcacatcttcagaaaggaaaattccactgcctgccttaatgaacttacgccggtctctaaacactttagtctaggaatatctcttctgggggttagcttattatctttattatgcattttagaggtggatgttactgcagataaaaataggaattcccagaggaaccagcaccagcatcatgatatgctgtatgtgcaatgttgttgcaaacagttccccatgagggtgagatggagacccctgcatatacacataactgtatctcacaattattaaatattgattcatctcagcaggggcctgtgtctgatttaaaataaaggcaagtgcattaactgatgctaatctaatctagacctatagcactgcaccctgggctgtctccactgaccctggttctctgattgacagtgtgcatgggagccatttcctctgccaaccattttgactctagaaatgcgcacacatgagtttatatctggagttataggatatgtgggatgtgagcataagagcttaataagaaagaaaggaggcctacatgatgatgaatagcaattacagggaattagattagtatcagcatctggagtaattgtaaacattttctggtgctgatgtttgatagtgttgggaaggggggcaggtggtggatgatagaaaggaagagaggccaaagataagaacaaatatgcaagtctatagtgtgtgcttaatggaactgagatttgtttctctgtgtgtctttttaagcctctagatagatcatgaaaaatacagccagctgggaaagaaatagcccaaatgtaatttaaaggacagctttttaaccaatacttcaacttggagacacctgtcctatgttccttaaagatgctcagctcaggggaggagtattaaagttgctgatttatcttcaggagcacagacctatttttaatttattgcccagtgacaggtttcttgtttagcttttctgtgttactcaacacaaccttctcagtaaagaagagctgcctgcaggacattgttttatttcatgttccagagccttagaagaaggaaccgaacttggacttctccaaagcatgttgacactctctctagcttcatggcaagcagcaaattgtgcaccaggaaatatagttgccttgcccactgattcacggcagatacacacacacacacacacacacacacagacacacacgatacttgagtgccttttggagtgtgtgtgacagcaatggtttaatcactcctgtgtcaatagttatgtcatagaaacctttgccagaaatatgtcttttagtactgtagagccacaagaaagaaaatgtgtgtgattcggtttatgcatacaaatgaacaatcgtttgtggtgctcctactattcgcaagaaacactgttccatgctgggggccataaaggcgaagcacacaaaagagataaaaacattataggtcctgccttctagaatctcatattcttgtgggaatgataggtacatatacgaatagttgctaagacaaactgtgatatactcgatcagagtggtttgaacaaagggcaaagaaggaataaattaattctggccaggggagttcctctgttcaacaaaatgatttgagcccttgttgtgtgctgggaattgttggtggaagggacagagtgtgcacaatacaaggtttggttctcatagctgttacattccaatgagaagagagagacatcagacactaaacaaatgagaatttcagagagtgtcatgagccatactaataaccaaagcatggtaatgagataggccaggaagctatgtgaggtagcatagcaaggaagggcactgagaaggggaaatttgaaatgagaactaaatgataaacaactaaatatgtgacactctggataaagagcatttcaggagaggaaagaaactataaaggcctgaaggttcttaaccttagcatctttaagagatagaaagggccgggtgtggtggctcacacctgtaatcccagcactttgggaggccgaggcaggtggattgtgaggtcaggagttcaagaccagcctggccaagatgatgaaaccccgtctctactaaaacctacaaaaattagctggccgcggtggcaggctcctataatcccagctactcaggaggctgaggcaggagaatcacttgaacccaggtggcccaggttgcatttagccaagatcatgccactttactccagcctgggtgacagagtgagaatccatcttaaaaaaaaaaaaaaaaaagagacagatagcagatcagggaactgagtgaattctgggcaaaatagtccaaggtaaagtcagagacttccttcaggggttagctctgtagcatcttagagacacagggacacaggtatggattgtgaatttaattctaagttcagtcaaatgccattggaggtttataagcaggggatgatattatttgtttttttttgtcattttgctttgttttaattactctagtcatgatgtacagagtggaatgtccgtgcaaacagtaaaaacaggaagaccacagatgtagtaagagtagaatagacttggatagtatttaccagaggggaaaaaacaggtcagtgtccacaaaactaaaaagcattgttgcagccccctacccctgcacactgcccctctggaatgcttatgcttgcggccaccacccaacgaagtgctgttgctggtggtctgggagcagcttagccacccaaccccaccaccatgctagagtgctttcaaacctcagctccctctacaaagtgctggtgccagtgatctgggagcacctcgctcccaccttccagtgcagccagtgctcaacctcaaggagacagaggacaaagccacagaccaagttccagcccaacagggttagagcacactgcccaggagtgatcagctgagccttggccctctgaacacctctggaaatgaagccatttgactatacccagcttgcatcgcagtcaagccctcaagggctgtaaagaacataaaaacaaaaagccctatccaaagacagtaacttcaaaggatagaggaacatcagccttcacatgagaaagaataagcacaagaattctgacaactttgaaacccaaagtgtcttcttacctccaaatgatcacactagctacccagcaatggttcttaagcagatggaaatggctgaaatgtcagaaataaaatttcggatctgagtggcctggaagatcaacaagatacaaaagaatgttgaaacccaatccaaggaaaagagtaaaatgatacaagagttgaaagatgacatgaccattttagaaagaaccaaactgaactgctggaaattaaaaatttactataagaattttataatacaattggaagcattaacaacagaatagatcaagctgaggaaagaatatcagagcttgaagatcactcctttgaataaatgcaggcaaaaaaatttttttaaagaatttttaaaaatgaacaaaaccttcaataatatgggattctgtaaagagaccaaacctacaactcattggcattcctgaaagaggagagaaaacaagcaacttggaaaacgtatttgaggatatagtccaaaaaattttcccagtgtggctagagaggtcaacatgcaaattcaagaaattgagagaacccctgtgagatactatacaagatgaccatctgcaagacacatagtcatcagactctccaaggtcaaagtgaaagaaaaaatattaaaggaagctagagagaaggggcagatcacttacaaatagaacctcatcaggcaaacagtgaaactttcagcagaaaacaaacaagccaaaagaaattgggaacctattctgagcatcctaaaagaaaaaaattccaacccagaattttgtaacttgtgaaactaagcttcataagcaaaggagaaatacaatctttttcagacaagcaaacactaagggaatttgttaccaccaggcctacttcacaagagttcctaaagggagtggcaaacatggaaaagaaagaatagtacctgccatgcttaagtatgtagcccactgacactataaagcaactatgcaatcaagtatatgtaacaatcagctaacaacataatgacaggatacaatcctcacatatcaatattgacattgaatataaatgagataatccccccacttaaaaggcatagtgtgtaagttgtattaagaagcaagacccaacagtctgctgccgttgagagatatatctcatgagtaacaacacccataggctcaaaataaagggatagagaaagatgtatcagtcaaacagaaaatgaaaaagagtaggggtcgccattcttatatcagataaaacagattttaaaccaaagttggtcaaaaaggacaaagagaatcattgcttaattataaagggctcaattcaacaagaaaacttaactatcttaaatatgtacaaacccaaaatcagaacatccagattcataaaacaacttcttagagatctacaaagatatttagataaacatgcaataatagtgggagactgcaacaccccactgacagcattagacagatcattgaggcagatatctaacaaagatacactgacaaacatgacacttgaccggttgaatttaattgacatctacagaacactccacaacaacagaatgacaacagaatatactttcttcttatctgtatatggcacatactctaagatcaaccacacactaaaccataaagcaagtcgcaataaattcaaaaaagtcaaaatccaccaaccatactctcagaccacagtgcaataaaaaaagaaattattaacaagaagatctctgaaaaccataaaattgcatggaagttaaacaacctgctcctggatgactttggggaaaagaatgacattaaagtaaaaataaaaaaataaaaacaattttcgaaactaacaaaaatggaaaaaaaaatagatcagaatatttgggacatagttaaacagtgttaaaaggaaagtttatagtgctaaaaacttacatcaagaaattagaaagatctcaaattaacaaccaaatgtcatacctagaagaactagtaaaacaagagcaaaccaaacgccaaagataacagaagaaaagaaataaccaaaatcaaaacttaactgaacaaaattgagatgcgaaaatccatacaaaagatcaacaaaactaaaagttaagattattaaataagagagaagatgcaaacaccatcagaaatgacaaaggtgacattacaaccaaccccatagaaatacaaaaactactcagagactattaaaaacacttctatgcacacaaactaaaaaacctagaagaaatggataaatttctggaaacctacagcctcccaagattgaaccaggaagaaattaaaatcctgaacagaccaataatgagttccaaaatttaatccataataaaaagcctactgaccaaacaaagaccaggaccagatggattcacagtcaaattttaccagatgtacaaagagctaataccagtcatactgaaattattccaaaaaataaaggaggagggactcctctctaactcattctatgaagccagcattataaagacacaatgaaacaaacaaacaacaacaacaacaacaacaaatcttcaggttattatccatgatgaacataggtacaaaaatcctcagcaaaatactagcaaacctaatccagcaacacatcaaaaagttaatttaccatgatgaagtaggctttattcctgggatgcaagggtggttcaacatgtacaaatcaacaaatgtgtttcactaaatagaattaaaaaaaacaaaataacatgatcgtctcaataaatgctgaaaaggctctcaataaaattcaacattccttcatgttaaaaacccctcaacaaattaggcatcaaaggaacatgcctcaaaatgataagagacatatatgacaaacctacagtcaacataatactgaacggacaaaagctggaaccattccccttgagaaattcaacaaggcaattattaccactctcaccagacctatgtaacataatactgaaagtccttgccagagaagttgggcaagagaaagaaataaaaggcatccaaataggaaggtaggaagtcaaactatctctcttcacagatgatgttattctacacctagaaaaccctgtaggctctgccaaaagcctcctagaactgataaacgaccacagtagagtttcaggatacaaaatcaatgtacacaaatcagtagcatttcttccttttttttttttttttttttttttctgagacagggtctcactctgtcacccaggctgcagtgcagtggtgtaatctcagctcactgcaacctccacctcccagtttcaagtgattcttgtacctcaacctcttgagtagctgggattacaggcctgtgccaccacgcctggctagtttttgttcttttagtagagatggggtttcaccatgttggccaggttggtctcgaactcctaacctcaagtgatctgtctgcctcggcctcctaaagtactgggattacaagtgtgagccactgcacctgactgaaatcaatagcatttctctacaccaataacttccaagctgagaggcaaatcaaaaacacaatctcaattacgatagccacaaaaagagtaagatacctaggaatacgtctaaccaagaaggtaaaaaatctatacaatgagaattacaaaacactgctgaaagaaatcagaaaagtcaaaaacaaatcgaaaaacatttcatgctcatggataagaagaatcaatattgttaaaatggccatacttcccaaaccaatttacagattcaatgtaattcctatcaaactactaacatcatttttcacaaaattagaaaataaaaactgtactaaaatctatatagaaccaaaaaaaaaaaagaccccatatagccaaagcaatcctaagtggaaagaacaaagccagaggcattatattacttgacttcaaactatactacaaggctacagtaaccaaaacagcatggtgatgttacaaaaacagacacgtagaccaacagaacaggatagaggcctcagaaataaagtttcatacctacaatcatctaactgttaataaagttgacaataacaagcaatgggaaaaggactccctattcaatagatggtgcaagataactggctagccttatgcagaagattgaaactggcccctttcttttaccatatacaaaatttaactcaagatggattatatgcttaaatgtaagacctaaaactataaaaacccttgaaaacaaaccaagaaaatatcctcctggacattggccttggcaaataatttaggactgagtccccaaaagcaatagcaacagagccccaaattgacaagtgagacctaattaaacttctgcacagcaaaataaactgtcaacagagtaaaccgacaacctatggaatggaagaaaatattcatcaactatgcatccatcaaaggtctaatgtccagaatctataacgaacttaattcaacaagcaaaaaacaaataaccccattaaaaaataggcgaaggacatgagcagatatttctcaaaacaagacatacatgtggctaagaaatatatgggaaaaaaaagctcatgatcgctaattgttagagaaatgcaaatcaaaccacaatgagataccatctcacaccagtcagaatgctattattaaaaagtcgaaaagcaacagatgttggcaaaattgtagagaaaagggaacaggtttactctgtttgttggaatgtaaattagttcagccactgtggaaagcagtgtggagatttttcaaaggacttagaactacctttcaatgcagcactcttgttactgggtatataccacaaggaaaagaaattgtcccactaaaaaaaaaatacactcatatgtttattgcggcactattcacaatagcaaagacatggaatcagcctatatgcccatcagtggtggactggatagagaaaatgtggtacatatacaccatggaatactacacatccgtaaaacaaatcaaatcatgttctttccagtagcatgggtggagctgcaggccattatcctaagtgaacaccaaatacggcatgttcccacttataagtgggagctacacattgaatacacatagacacaaagaaggaaacaatagactgtagtgactacttgagagggggaggatgggagaaagatatggggtgaaaaactacctattggttgctatggtcactacctgggtgactggatcattaatacaccaaatttacccatgtaaactcacaatttacccaagtaacaaacctgcacatgtactccctgaagctgacataaaagccaagagaaaaaaagaaaataaaaagcatcgaatccagtttttggcctgtgagagtgaagctcaaagggaggttaaggctgatggcatgaatttggaaaccatgggtatctgatagcagttaagccacagatgggatggaagggagttttagttaaagaacagggctgatggtcatgaaatagaccatgtcagcatttagagtttgacattaaggaggagtagccagtaaggtaagtagagaataaggacagtgtgatagcatcaagccaaagatggaagggtagatctgctcaagtactgctgaaagattaaattatattgaggacagggaattgggcattagatttggtaagatgtacctcctgggatttggttacacagagattggggaaaatgattctattaatagttggattggtgagtgcatatttgtgtgtgtaattctatttttgatcttttaacatgtcctgagtactatgtaaataatctaaattaccatttgtcataaccaccctattaggtattgttttttttttaattttgaaagagagatgtttattgatttttaatttttttattatttaagttctagggtacatgtgcacaacgtgcaggtttgttatatatgtatacatgtgccatgttggtgtgctgcacccattaactcgtcattgacattaggtatatctcctaatgctatccctcccccctccccccaccccacaacaggccctggtgtgtgatgttccccttcctgtgtgcaagtgttctcattgttcaattcccacctacgagtgagaacatgcggtgtttgcttttttgtccttgtgatagtttgctgagaatgatggtttccagcttcatccatgtccctacaaaggacatgaactcatcattttttatggctgcatagtattccatggtgtatatgtgccacattttcttcatccagtctatcattgttggacatttggattggttccaagtctttgctattgtgagtagtgccacagtaaacatacgtgtgcatgtgtctttatagcagcaagatttatattcttttgggtatatacccagtaacgggatggctgggtcaaatgatatttctagttctagatccctgaggaatcgccaccctgacttccacaatggttgaactagtttacgatcccaccaacagtgtaaaagtattgttattatttgcattttgaaaacaggacactgagaaattaaataactttctgaaacatatgtctgtttatacatttattacttatttatttgagagacaaggtctttccatgatgcccttgctggggtgcagtggtgcagtcttggctcactgcagcctcaacttcctgagctaaagtgatccagcctcctgagtagctggatctacaggatcatgccagcataaacagctaagttttaaaaatttttttggaaagatggtggtgttgctatgttacccagggtgatctcaaattcctaagctcaagccatcctcccacctcagcctcccaatgtgctgagattacaggtgtgagacactgcacctgcgcttataaatgtattgaatacgactaaactgtatacttaaaagtggccaaaatgataaatgatagatacattttaccacagtaaaagctttgaaaaactatggctagtagatagtagattcaggattggagcctgagtctacttggctcccgagtctgagttcttggctatggtcatattctgcagatttgcatagagcccttactgaatattaatccattcagatagagagcaatgtgtgatatttatcaagcataattagagagaagactagaagataagtggggaaggaggagtgcctaatgtctcaggacatgtactttaaaatttattctgtgggtggacagagttggcaaattttgaacttttgaattcattcactcatttagtatcagccatccagccaatatctaataaggccctaatggaagacaaggtgtgtttagctaggactaaatgatcagcaatgtttcagacatgtagacctgaaaagcaagcatcttgtaagacaagataaacattatcaaccaaggcaggaagtacggaaagtggcagtgaattctttggtagaacagtcacagtctagggtggctagagtgctaaatgggagagggccttgaatgacaaagcatgggtttttaaatcatgttatgtggacagctatgattaatgaaacataaaagatcatgaaacatcagcaggagaaatctaagaaaggcgtgacaccacaggtagggatgtttggtgactgcaaagcatggtacatagagtgtagttcacctaattcatatggaggaggtttattacatggttaaagatacaaagggtcttaggttctgaatttttgttagttttgaggcacaacgtttgcttctatatgcttttctgtaattggacatattttggattgggtggtcaggctctttgatgtgcagagataaatgaacgctgttcagtggcgtacatcttttacagttctcaatagcaagagaagatgctggcataaaacccacacaattgcatttctcatagtaagtggtcaggtgacctcttcccctctgtatccatagataggggagaaattccttcctgagtgataccggggagtagatggccttgtgtcaagattcactgacatcctgatgggcctgctttctcctgctgggaactggtgagcgagaaagaagagttattgtcaaattcccaacttgccctttttgatataaagttcacttgtaattttttttttacttgtgttgctaatgcattttgttctcccaagtgtgagagacctagcttcctctgtagcctttaattagtttctgaatgatgacatgtctactgagaagcaactggttgcgtccctccaatctcggggggagataaaggaatctaataaagacattcggtatttctaggtgatgtgtttgacaagctttgtattaacaagaagtcatgttgaaacttctctctttccccaactgcactgcctcactcgctccagcactgtgacatttcacagggggattaacagagctgccactctcgctgagaacttgtagtttaaaacagacagacctgtgtctctacccctcatgctaaaggggaaggagcttcgccttgatctattcaccagccataacctttatgagggatttagtggcaataaggtcttggaacacaaaatcaacggataagtttcctttgacagcagtgggaccacctcccaggattcaagattcaaggtcggataatgagatgtgtcttcctcgcagctgcctagttattccctaagacggtggtcacaaggagtgtgggaacaactcaagttttaattctggcatgagcaatattgggactgtagcactagagagaggctgaaactcttctcagggctaatgaccctcctttgctgaactcaactgtgcagttatttggagaacaagagaaaaatctctggaattatttgcactttactgcagtcatggggtgaggtgtggtggggacttcaccacagccttcttactgcagtcagcataattccctgctgcatacagttttatagcttgtgtttgagtgcataactaccagtgcttttaggcaattaagaattaaagtgccgatgacgccatgaaggcagctgagaatgtaagtgagcttggcgctgttggcagccagcagattgacagctcagaaatgcaggtttctgcagagctgagagccgagagcggcgaccacctggggacaggggcttagtctctatctggttgacctccatttgacctgagtgaggcagcctaggagagaggaatgattattacctgagtatctcttaagggcaagaggagaacattagcagaatcatggctcagagtctaagaggttaccatgacctatacatacatacttacatatttgtttacctgtatgatatcaagatgtagaaatacaaacttcatcccagggtagagtaatggcacagactattatagcaaaatgttttttctctctgtgaagtgggtttctgaacagaagcaagggcatccaaggggcagagttagctaacatcttcctgattttgcagacaaatgacccctattgaaaaggtagtgggattacagaggttgaagtccttagaactagaacagaagtgtgtgtacctagagtgtccctctaattgaggctggagctgccagtggcaccctctacccatgagttttctaagcctaatggaatggggtcttgttccatttctatgaagatcttttggagattgtggaaaaagtctgtctaggggagagaagcaactaatggagtctggtatatgatagaagtggcagtcaccattgcacagcttacagtatctggtcacttgagtttcatgaacatcagctgcattcttgctttgggaaaggaaagtcacagtaaggtgccagatgccaaaagagcgaaagacacagcttaacgaggccttgcggttgagcctcaaaggatatggcaaggctatggcggttgggaactacaggaatagacaattcctggtgagaagaaattagaaacagtgatgtcagaaatctcttgccagcccctggctctgaggagaggatggatgtgaagaaaccttgcatgtcaggagatgttgctgagcactataaataaatcctggtcagcacatcagggttggtttttacagcaaacaattatgctgtttaccactaattcattgaactctgaattatctcaatcacaatagcattcatttgcagagtgattagtaattcactaagtgctttcaattatacctacatattttattggatcccaaatccctgtaggaagagcttgggtctgagaacagccactttctagctcagtggcttcgagcacatcattagcagggtaaaacctcagattcctggatgaaaagggagagtatatgggaagcccttattaggtcttcaacaaatattagttttctcccatgaggaataatattaaaaagtcatatttcctctgtttttacttctgttctcttcctcacgaaattatgtaatgaattagattaattgattcctttctcattgtgacgttatttcacgttttgaggatcttttgcttgtatacattttggctgtcagttttcagggacaccttattagagaatctgcagtgtgtctgacattctccatgatggttttgggttacttgtgtaacctctccaagcttcagtttctcgactacacggtggggaatcatgccttaggagttacggtgaggatttacaagggagcagcaaatgtggaacacctggcaaagtgctcggaatagaaggtgtttggtgtttcttttcttcccaccccatctatcctcccttcgtgaactggtccctaaagagagaggcctggtggtgaagggcaataaagccagtcatatagccccaacccaaagcatgcactgccatacatggaaaacacgcacagctgggaaacagatggccctgtctggatggcaggtccacatcatgatcactgatacaccccttatgtttccatgttaaaaaattgatgaagagacacttcttagtaatttcttagatgtgacccacataatagggcacttatgattacaggtagttgctgtgaaattcaatttttaccattatgccccgaagccaagaggcatggaataaggaaagaatggtatggactgcactctcttatgtctccatcaggaatgactaaaactcggtcaagaggcagagctcataaagacttccttccacatttcagttgatcctgaaaggaacaagttccaatcttcagaagcactggtttatgactaatcctgaaaaaatcactaggtttttttcctagagcttcagggttttctagccaacatgaatggttttactatggagggcgagagaaggaatgagatgtaacaaatgacaaaagggttctggtgaagagaataataatccactgaggttatgccattaaggagctttctacattttcaagctctcatttggaattctgattgactgtaatctgacccttccgttcttgaaaatgatggcagcaagcgcattgctgacaaaagaatggggtcctgttgcacagcgcaccctggcctggggcctgagtcctcatttaaagatgctgtttatcctcaaaccttgagcacatcagcagggcgtgtggtgcatcccaatgtccaaaccaaaacagccccctactgcactaaaaatctctatttctcttcgtattggtctctacaggtacacatttttagtaacactaagaaaggacatttgattaatgctttatgtataaaaagtgatttcttaacattttaatctgatccacagaacatctattttgaggagaaaagataggtgttgatatataatgaatacaatcagagactctaatgattgccatgcacttatacagctagtaactgtggggtgtgggcttaaaacctcggcttctgatatgaagcttagggttctttttttatcaaaagagaccttagggatcttcatgtatattcccatgattccatgtgcgtttgttatttttctaacccatattatttccatttgaaaaaacactgcgcggtggcacatgcctgtaatcccagcactttgggaggctgaggcgggcagatcacgaggtcaggagatcgagaccatcctggctaacacggtgaaaccctgtctctactaaaaataacacacacacaaaaattagctgggcttggtttcaggtgcctgtagtcccagctactcgggaggctgaggcaggagaatggcatgaacctgggaggtggagcttgcagtgagcctagatcgcaccactgcactccagcctgagcaatagaatgagactccatctcaaaaaacaaaaaacagcaacaacaacaaaaaaaaaacactgcaattttcagctgtatgtccttgaacaagttccttgactcctctgagtatcggtatcctcatctgtaaagtgtgggaactaattaggatgaccaatgcatccccatttgcctgaaatgcttttggtttcagcagtgaaagttttatgtctcaagaaactctccaattccaggtagacctgggcagttggttgccttagagagaatatctatttgtggggttcatacagtgaaaaataaaataaaggtaatatagccaaacacctgttatacagcaggtatttaataaatggtaattatcaacatcattatgttcacttacagtccttgggggcaatttaaagatcttgaggaaattcagtcatttcaatttgtttgcatttgcatacagccttgagagaatacagtaattcattcactcagaaaaattgttgaacacaaacgatgccaggcattatgatatgtgatgaccattttcaatgaacgagacaccagtggagcttacattgtacttaggagaggcagacagttgtgtagcaagccaggcaggctgggggttctcttgtagaaagggggtttgaggaagccttctgtgaggagctgaaattgaaataattagacagaaccaatgtgagtagcaggagaaaggcaagtgtgaaggatggagtcaaaggtgggcttgaggcatttgaagaggacaggtggccagcagggtgaggaagggagaatgctgtgggaagagcatggagagggaggcggcatccagagtgtgcaaggcctttgagaccaaagaaggagtttgccttcatgctccatgacagattcatctctccgttcagtgtggatgagagaagggaggtcctaaccaagcacatttgccacagcctgaatcccacctgaaccactcaactgtgcctaggcttcgcttgggtacacagtggcccttgggaaaagatggatttttctcaaaaccaacacctgcttggttgcatctttccaagctttccaatctgggttggacattcatgcaccaggctgttctcataggccttagtgtctctgcacgtggtctggaagccagaaaggttaagagcactccagatttgtcccattaattctgtaaagacaaaggtccctaaagaggccttagcagtgaagcagcccttgctgtgagaactgcccggaggagatgcgggcatctccagtcttcaagatagaggagaggcaggaggggaacccccactgccagccaaggaagccatctgggatctgtagatctgcatgcgccgtgcagttacctggtccaagtggcttatgtgcattctcagccccacaggactgcacagtgcttcataaagcatcctgatttggatttaataggatatccactgtgtgctaaaaacagcaaattgctatttattaatgacataattattaaaactcaacacctgggcagtggaagctaaaccaagagtagggaagttcctcagaatactgttttaataattatcttatttaattatttacacatttgaattaaaattcaataagagccggattaaacattaacctaatgtattaaacatggaactgtatccaaacagcatggctcccttggcttctgtctttcttcctaaacataccctaaccactccttggtctttcggtttctataattggtatattttctagattcagctctcagaagccaggaggcaccacatacatgcctgtgggtaaaagccaatgaccttttcaaaggactcttccactcatagcaggtctaatttactattggcacgtcagttcttacccctctgctctttacctttcatgtggattctcaaactgggatcttgcccagacctccgatcctctgattccaactgctaacataatagtaatattcttcctggatgtccctcatcatctcaccatcagcaagtctaagatagaattaatcacactaatgttctccccaaaagtagttccccctagaaggtctaggggtctccctgtgcagccgtccagatgctacttaacagaacggcattcctgctcgaccccatctccctggttgtcctcctagcaaccatttgtgcatttttcctgggcatggctctccaatccatcccttgcttttcatcttttcagagccaacagtttaatccaggctttgaacatcactgtcgattgatttctgtgactccagtttctgtctattttactccatctgacacaatgttaacagattctttttcttaaaataaatttttaaaaaattacgacatttcttttaaaaaacttcaaatgcttgtcactgcctgtaggatagagctaaaacctaggcactaggcattcacgcccttccatcatctggctgtcattcacttcatgatcttgtatcccatttttcattgattctgtcaaaatttatggactgtccattctgtgttgacactgcatatatgtgtttgccaagcacatacaatattaaaactcactcattgagcacttcacattgccagaaactgttctcaatgcatttcataacttactcctatgtctttgaaacagtctttatgaggttcagacagttattagctccattttataaatgtggagagcaagacacaggcaggtgaagtaacttggccaaggttgcccagttagaacatagtagagccggatctcagcccctgctctgcgttgcctcttgtagtcaatagacattgtatttcttcagtttgtggatttctgccttcccatctgtgcccatgcaattctgtcccatttgaaacagcttcactttttctgcctagatacctgtttctcatttgttgagacctaaaataaactccaatttgaggtgaagccatctctggaactctctctagctgttatcctccctcctagtaactcatagcacttaaagtttgtactgttcattcacattcaatcatacacaattttccaacatattttgccttgttattcaactctctggaatgtttacatgccctgtttcctcaaacagattgtaagttcatagagggccaggcaaattggtatatgtctgcatgtctttcatatacctagcacaccattgtgtaacagtaggtgttcacaaaatgttcattggatgacttttggcccagcttctaaagcaagggtctccaaacctcaggccacataccgatactgctctgtggcctgttaggaaccaggccacacagcaggaggtgagcagctggtgggtgagtgagtgaagcttcttttgtatttacagccactccccattgctggcaataccgcctgagctctgcctcctgtcagatcagtggcagcattaggtaggagcacgaacccttattgtgaactgcccatgcgagggatctaggtcgtgcactccttgtgaaaatctaatgcctgatgatctgtcactatctcccatcacccccagatgggaccccctagttgcaggaaaacaagttcagggtttccactgatcctacattatggtgagttgtataattatttcattatatgttacaacattacaatgtaataataatataaatacaatgcataataaatgtaatgtgcttgaatcatcctgaaaccattccttcccgcatccccagttcatggaaaaaattatcttccatgaaacctgtccctggtgccaacaaggttggggactactcctctaaagtagacttcttccattaacagttgtgcctggccacaaaatgtcttactgatagtgcttgccttatgttgtctcctttgcctaggatatctttcctccttttctctccagatatgattaatttttacttactcctagggcttaacttaggcatcacatatctaagaagcctcttgtggcatccatgtcaaggttggcttagatgtatatcctctgtgtctccataacacgtgattcaccattctgtgtcaccatacattagaatattaggcttctgcatctattttgatatcttgaggctgtgaactccttgaggaaaaggatggtatcttatttagtttatgtctctaatgcttggcacaatgctggcatatggaaagtgatcaatgaatattgaagaaggagtgaatgaatgaaaataagcaaaacaatcctagtatgtttctaacagtctgagtgatgagaagtcagatatagaatgtatccatggaaacaatataaaaatataagtagccctatctcacacttggtcagaagcttccttatgaggatggcttagctaaaaccacagtgcaccctaatcaattcaagtagtcttgaatactgacaatgtactagaagttgccacctagaaaatcatattttgactcccttagcatcttaggcatatgccaatttgtttctgataattgggattgctcccctagtcaaaccacctcatctctatgccatgaatgatctgtctttctcactcacccaagggcaatttgcctccttcaaactgtattcttaggcagaatttaaaggacagcaagcacttctcaacttctacctcatgagttggatattttccaattattagtggggggagacaattctagatgattcttccaagcatgaggtgcgattgtctcatttaatatacttactgcactgacagctctggcccaaaccaccttctgtcctgcttggggactgtccattgttctctagtgtatgattagcagattacctatcatgcaggaagccaggaaaatgaactcacagtaagcccttccaaagcaagagtaattcattacccggcctgatttccacttaaaatgtactttaagcacacttccaactacaaaccctaaatcaccctgtgttcacaaagtccatcattttttattttattgcatggcattggcgtgacataatcccttgcagagcatctcggagtgctttacagatcaataaattacttacctgcacagttgaagcaacgtctgcaaggccagcacagacattctgcaggcagcctgtcctccaggaagcaagcaaggctgtgtgggtgctaagagtgagcagggacagggaccagcaaacgtatgggttggtgttggggggtgggggaaggaggtggctggtgcatgagatgggaatgctctagttaaaactctgaataaaacacatcaaagtgtctatttttgcaatgatcaatttaaatgattccagaactaagagaatttagaagcttgtacccttcaggcagtcagcaaatcaaatgctcagtcattaactcatcagttacctttctgtcctggaaggctccatgtagcttttaaaatgatataaccataaatggcattgttacatcttaaaagtcccagattatagagctagcattctctctcctccaacccttgtccatgtccactctccattatttctgtcccaccaaatgcttatgggagtgcaattgagtgtgtatgtgtatgtgtgtgtgtgtgcatgcatatgcagagacacacacgctgcctatctgaagctcaatgaggatggaaatctaaaaatgattaactgttgcttactctgtgtaacataccctatttaggacagcaaaaaactaaaaagttaaatgaggatcttttcaaatatcttatattaatgtaatttatagtataaaaggaaaggtgggaacatgttacataaaagtttactttaaatgccgtataggagacactacagtgctgtggaatccccaggaaggagaggtcacatcctcttcaggttcatctggacagccttattaaaggggtggtaattctctcaggccttgaacaattttaatagatgtggataggcacagagaagagtgtaagcactgaagtcagcaacaagggcatggggataaggagatagctcagtgcagcacagataagtacagcacacgcttattaatgatgagcatttcaattgggtggatgcaggacatacatggaaggtaacactggagaaggagagaaggggaagaaggctaagatatctttataaactcccttttcatgaaggaaaagatccaacacaactaggaatgagtgagtaatggttcaagtagaggcaagaccagcattaaaatttgcaaacccatctgattttagtgtgagggccccactctgacctcgcaacaagcaataaagtcatcgtgcagcttccctgggctctccggcaggcccgatcacattgtaagccaggtggatggtgtgctttagaattgcacagcatggtggctctgaggaatagttattcaaggaaagaatataacatgaagaaacagaagagtgctggatggaggggacacttaacttgccaagaactaagaagtcaaaaccagcatcaggagggttgaaagaatatctgccaatgacccaactctgaggttggtatggacacgttgcacacaggttgggaaggtggttcccttgaataaccattatcactcaattctgtaaatatttgttgagctcttagcgtggatacagatataagtaacacattgttcaggtcatcagaaagctcatggcctagtgggtgatgctaagcacataaccatagcatagtgaaataactgtctagaattggagtgtgggagctcagtaaatgacatctttactccatccacttgaatgttaaaacacataagacagataagtagacacatggaaccaaatatcacatgtttactagtggtaaagctgagactggagaattaggctcagatgtgcagcaacaatgaggttctacgactggaccccggaaagaaacgcacacacatgcaatggctggatgttccacaggccctatccagtccttgtgggtgctgcttctgaaaataagcacatggaggagcacaacataatataagcttcagaaggttccaaaatagaagaccaaaggaagtagacatcctgtctccaactttacctattagaatgaaccccttctctccctagggggagtcatttagtggagaaagaaggtgggggagagagagagagagatgttatggctaactgaggcttaatttgattccccaccaggtgtgtagaatgtgctctgggcacatggatgaagaagcagcagtcaatttgagatgtccaaaagggcagagaagtatagagggtagggaaagtttcaacaaagaaagtggcatttgctttgggccttaaggatggctgcgcgtgcactttgataggctgaggctggtgaattgcttgagctcaggagtttgagaccagtctgggcacatggcaaaaccttgtctctacaagaataaacataaacattaacaaggaatggcggcacatgcctgcagtcccagctacttggactgaggtgggattgtttgagcatgggaggtcaaggcttcagtgagccatatttgcaccactgcactccagcctgggtgacaaagtgaaaccctgtctcaaaataaaaatgaaaacgagaatggctgggagttgcccaggaaggataaaaggaacaatatgaacccaaatactttatgcccagacagggcatgatggagaacaagggagtcagcagaggtgggatcactggggatggccatggaaaggtgggctgatgcttgattctgcatggcctcatgcctagaaggagtcaggctatgaccaggtggccatggggagccactggagctgtttagacagagatgtgatatgatcagaattgcattctttcaagacatcgctgaatgcagtgtggaggatggctcgtggatatgtgttggaggtgggtgggggtgagtggatacaggaagagggtggaggctaggagaacagctattccagtgttgcagtagaatttattcccattcggactccctgactttgtgtttaaataggaggaaatcaaagctaaattaaaggtaagacttttttatgtttaaggtaattcctctaatttcttatcgttaacttactgtagtccatatattttactctctggactgttctgccaactaccatgttaagacaactaagaaatgtttcaggaggatttttattttcattctgtcttgtttccacagtatctcccaaaattgtagagatttcttcagatatctccattaatgaagggaacaatattagcctcacctgcatagcaactggtagaccagagcctacggttacttggagacacatctctcccaaaggtaagagaacagtttgttgcattgcatcatgaggataaatgggggaattttgggcctttggtaggaggttatgggtgctgatacctactccagaggagtctacgtttttggtggcttgatggtaatctactcatggctctgcagagaacgttgatgttctctgcaaaacagccataccctctaagatttcagaattcatacctcagtatctctccagtcccttggaaattaatctctgttgtctctgggtgaaatggtggtaaggtgttctgggtgaactttacatgttgtttgatgatggaacaaagctttagtggcaattgttcagctggttgttttaaaatagagaaaacacataatgatgggtgagagctttaaatggccatattcctaaaaggagattctccaagtctgtgcctctgcagccttgccaaaaatctggtcacgagctgtttttgtggttttgttgttgttttactccgattgatcctagagaacaaatataacttaatatgtgactaaattgcaaaaatttactttatctgaatgctcagatgttacgtagaccaaagtgttgttttgtgctttcatggattgtacattaaaacctttagaatttgagacaagatgtcatttattattaagctagcttttatttgggaacaagaaagataaaaatatttcattcttaaatatttattgagtgcttgtaatagtccagcctctcttctaggcactgggggttacagcaataagccaaagcggtgaagttttcacactcatgaactcacattctcatgagacagatgacaaaaaaaaaaagagtatgcaatataacaggtggtattaagggtgagaaaatagaacaggatgtgttgacagaatgacaagagctttcttcagagaagggctctgaaaagaagatatttgtgcagagacatgaacagtggtccttaattgtgttgcttattgctgattaatgtgaaatgtgtgtatgtgattatgtatgtatatatgtgccggtgtgcacagatggatgaaggtgtgtgattggcatgaaagacgcatattagggggtgcttttggtctcaactcccatggaagggaaaagtgggaaacagaattgggcaggttagaagctggcttgtgcagtaggacatctcggctgagcctacggggagctctgaagctaggattgcccttcagaaggttcccttattgaggtgatggagctggtcctctacatcggcacagcagtccaaatgtaggctgatccccaaacaggtgtgactgtgggccaggcatctctcttcacatgagacacagggggctgaccaccgagggctatccaccagcagccggtccttctgtgaggcataagtcctctgctcctgaaggtgactgtgcatgacagtgtccactatacttcaacattttaataaatcagagtaagactatgaaggggccccaagtaccaaattctagacagtgacagttggccctaatggatgttctcagagaaggcgtgacattttcagttgtgtgtggcctgaattcctgggagctgtcctgggccaccattcttttttttttttttttttttttgagacggagtctcgctctgtcgcccaggctggagtgcagtggcgggatctcggctcactgcaagctccgcctcccgggttcacgccattctcccgcctcagcctcccaagtagctgggactacaggcgcccgccactacgcccggctaattttttgtatttttagtagagacggggtttcaccgttttagctgggatggtctcgatctcctgacctcgtgatccgcccgcctcggcctcccaaagtgctgggattacaggcgtgagccaccgcgcccggcgggccaccattcttgacactgtaactgtgaacaaggggtctttgaaagctattcatgtgtctgccagtctctccatttgaaatgacctcacatgtggactggcccaaaatcagggaggaagcttcagctgtgcatgagatcattagtgatggaaaatggccctgggcccttctgaaggaggggccattcagacaggtgcatgctaagtccgcggtgtgcaccattcatcacagcctgatgtgagtccccagtgctggcggatgccagcccagtctgtgcctttggagtctgcagaacatttatcatcagggtaagcttcctgtgcctgatgtcaagaggctctgtcttctgtttgatgtctcttctcattccctcatctggccagttctttgtccttttctgggtgtttcttcccccacttctcctgcatgcgtctcctttttgtcctgccattttatgcctataacttcccgataagttatttttgttgttgttctatgctttggctttctcttgcagcgtctgaaatgtttctgctttaatttcattattttccacattctctcttccctccttgcaattgtttgttgtcttcccctctgacatttgagcctcttgggtttgcctggctgatgttcacaaggctgtgtgttagagtcttttgtttccccttttgtgaccatcgaacagattcatttcccaagggaacttttgcctgagcctgggccaggtgtcccattttactgaggttttagctgctatggaaacagaagatggagcaaggaaagaggagcaggacaatcagaatgtacctgtggattaatttacatgaacagtgttttccagatctcaggtccagtttagttatcccggattcaaaatgatgagacatgccaagcaataactaatcacctcagaactcaccagagtgccatttcccagtgactgattatttggagatcagagatgtcacttggctgctgcccaatatgaactgaagctggagaccctcaacagtcaggccttcatctttccccagtagtatttcctaaaggaggcttattctaaataaaccaggatgggcttggtgttccttggagaagaagatctgcaccttagcggaggctccaaagaaagagcgctgttgtcatcttttgtgtcattcttcgagggtagatcacagttccatcaagatctttcttacatgcgaacctgccaaatccctggatgaacagctgatcagggctaagctctttcagcaaccctgatgacttcattgcattttttctctccagactgatctgtttgttctgtacatttcttaaaagtccttgtttccttcattatcacttatgtggtgctgcttgcgataaacttatataaacctctttaaattgtgcatttctagtcttgactaccttgtgtggaaaggagtacagaaatgttaaggactattttagacgtggctcatacactttgatataggggcagcttaggagtgaccatcaggtggaaacggagatggagggccctgtgtagcactttatatcagatagagaaaatgtcagttgtgcatgtccagtacagagagggaggtaggacctccaaggccacctcttggcacttccattgattgtttgaataatttccgtatattattatgggcattatgcctttgtagttcccttcaggaatttatcagaattcaaagagaaagtgagctagctttttaaagattcctgccctgactctgcacaactggtttgagatgggccgatgttgtttgcatctgcagagaccttggtcttttcaggaggaagagcccccatctcactcctctcactagcaggagccatctccatccacatgaaggcttattgaccccaagccggagtccttctaagtgctagcatagggtactaggtgcacaggcaccgttggtggaaccctaaccttctgtaggtagaaaaaaggaacagggcagccaactgcccactgtgcctggtgtcatgactctgtgctttgccctttgtctacatctagaccttcaagaatgtgttttttagcacatcccttaaactctcagctttctgtctccaatagaaaaacgttcatgctgtctggttctcctgagtcttcactatgtaaatagaagcatgatctctttcaatatactccaaaagatgctgtgttggacctcactcttcatagaaaagcattctgaaagccttattgttatgttaccagtttcagttggattgtaagagctttaaagacaagtctaggattcctacattgccacattcctgagagcccaaaatgaaactcaggtgagggagtgagtctcatcacttatctgtgggtgtcactatccatttgcagccagggatcactgagtgtcctaatggagctcccatcttgggtgcacttaccttcacctttctgtcatcaaacaagacactgacaataaaaacctcatctaggctacctagataacacgttgtactgagatattggtagggatattcagcaaagccctgcaaggtgttcacagaaatgtcctcctttccagtttattttcaatgtccctgtcccatgagttctttgagatcagagtttgcatctcacttctctttgattctctccttctagcacaatgcctagcacctaggaagtgtttaataaatattggtcagttcagtgaacaagcactgatatttgccaatgccccaaagaggcatgcctgttctcccagttcaaagactatcttgatccttcagaagttgtccttcactttgatgttggcatggagacctggagtgtttctggctggcgagtctccaggacattttctctggtcttcacaagatctccaagcctttcctgaagtccccttgaggggaccttgctgtggcaggactcaacttgtccttgaagaagaaactccttttcaagtttccttttgcaagaagagaggaggctcacaggtgacttggacagtgggtcatccatgagcttccttctgctgtcatggctgcctcattgcaactgctcttcatctggccattctagtgggcatctggcccttttggtgccttgctgtaccaagtactcctgtgtctaaaccccggatgactcccaaccactatttcctaaggcaatcccgatatcacctgggggattatttcaactgtatatgaaaatttgccattccttataggttaactaaagaaaaaggaaaagaaagaaatcaatcggtagaaaaaagaaaagtactttaaattcagttccactcttgtgcctctttctctctctctctctctttctgtgtgtgtgtgtgtgtgtgtgtgtgtgtgtgtatgtgtatgtgtatgtgtggggtgtgtgtgtgtgtttctcaggttctctctttctctctttttccttctttctctctgcctcctgatatatgaattgaggtgggttagagatcaaaagagatcttccctagggtgatataaagaccctgggggcagaattagagcagagccttctgtctgttggattccaagccaagcccttgttctgcaagcctttctctttacctaacgtgaagtgggtacatctgcgtggcctactctccataccaacagggctcagtaaccttcctcagctgccagatctcttccttcccacctcagttctccttttctacttgaagaggtccagtggacatttgactgccctgtttcttttttctggagttttaaaaggcaccaaattgatggaggcaaagtgacacccggataagagttctcctggccaatgccctgagccctgtgctccccctccccttccccaatatcctcaccccaccatacatccacctattttcctatttgtaagcactgacaaggccttctcctagccaagcaggacactaaagcactaattggcactagaggtatcacagcttgagttcaaccagagctggcaggttccatgactccagtgacagctctgtgaaaaagtgtcaggagcagagctctggcgtgccatcggctgactgcagcaccctggaactaatgagcagcctgtcagcaccagcatccggggccccgtgtggcgctgagatcattagaatggcagaggagaaagacttcctcagcaaagaggagctggggaggggagaagagggcaaaatggaactaaagatatcaccttacccacagagggcaaccacccaacaccaaaggactgagaagaaaaagggagaaagagagaaagcaaaagtttttctaaatccatctatgccaattctagacaactcttggaatctccttttggttgggttgccctgtcagtaatcaatatgggctgtaaatccttgcaataatccaagaaggggcctcagtgattaaattaactctttagtcttggctgtgctctgaaacctggaagtcgcccaagtctctaggaaagagggacctagggcgtaaggcaagacttgagatcttagtctttttgctatttgtcagggcaggctctctacctagggtatctcctgcactgccagctgcctgcctatcttctgctagagtatcagaatccaggagagacaattaatagaaggagttttcgctctgttattccttcccagagggaggtagggggactagtcagtgtgtccactctgtatctgcttcctgaggccaagtatgaattatccatcttgttcgttcttctgcttcaggaccagaactgggccttcaggtctgagcattaagcaatgcctggctcttctctgaggcttctgctactaacaatgactgcatttccatgagcaaaggcagcaatgtgtctgaaagagataggctttgaaggcaggtccaaggggatttgtattcccttgcactactcactggctgggtcatgctggagtagtgataaacctctctgaagatgtgcttctttattaatttcattcttgcttcttggcgtgaaccctggcgttttcatgatttggttctagaccccattttctccacacaccacagtcacactaacaacttggcattctccacacactagatgtctttgactttgcacaccccatctgttctccttccatcccccctacttcttttggtttgagttctgcccttgtttcaagaccatactcaagtgctaccagtttgaaagcctctggtgactttcttcaggcagagtgattcacccatttctttgagatcccacagcactttgcgtgcatttccaactatggcacctcttacaggtactcaagggcctctgactactcctgtcatgccagggatcatggcagccaggaaccaccctaatgctgttttgtctttagtgtctgataaagcaccagatgttttggggtcttgtaaatgattgttgaatgaggaagtatctgatactgtagatgtagttttcagtccctttctaaaattaagtctctcttaatttaatatgtataatattatattattaaaggtaatataatataataatgtatctctttgcatcagtttggactgtggatcatctcatatttcccaaaccaatcaaaggaattcataagaaaaggccctccccccccactgtcttcctcatgtgtactcaagtctgagctttagactctgtgaaatagagataataataccttcccacatggatatgacaaggattaaacacgtgcaccaatggaaagctcctggccccataacaacacatagtatgtgtccaataatgttagcttgcagaccttcagccagccccctcctcttcactcccacccgtgagaaaagaacggaagggaaggaaactcaagttattttttttctgaaaagattgaatctttataaaagctcaactcagtccattgccaaaatggatagatattcaaaggtgcttaatcagcaccactatcatctccaccattttctaattaacataggtgcttgattaaaattcccagtaccccaagaagctatcccaggagggccaagtaattgccattgcaaaagatattacagtagtcattgatggtgggagaacaaaaaaataattgcatcataatggaaagtggccagcttcctgttcagagtacctgtgaaacatagagcattaggttcaatatatacagaaaaaaagggattaattgtgacaaagataaaccagtggtacaacctcaaattggggaaaagtgtccaggaactccttacataagtggcttaaacacagacaggcagaccaaggtgggagagaaaaaagcagaggaagacatttatagatcactctttaactctgtcattctctttaactgtaaaattactgctagatagatgcagttagggtaaaatttgccagtgtcaataggggtttttgtaaatttaatatttatgatctggtttaaagcattattatagctgtgtaacttcctacttcaaagaagagagaaataataaaaagactagtggggaaattaatgagttcaatgtgctgaattgagaacatatgaaatcaagcctcattctagaaaccaagggcaggagtgcataccacagacactgtttgtggttttacccaattattttaaaacccttggaaaatattgtagaatcagatgtctgctgaattcagacattgctaacagcatcctcccccacactctccagagtcttaagctatttatgcctgtacttggtgaccgttaccatgcagaactgtcttgatggaacaaataaaggaaacataatagcaagaagattgtatcatcctccccacagaagccaaccagccatagctcagtaagatgcaaagtctcattaaaatggtagcccctacagggcaggagaccccatctctcaaccagcacccataagagtcagcaccgcctgggagtatgagaaggtccttagtgggatgtcccaccgcccatcacaaccagggtacctcctcgagtcacaccgctgtagaccagctaaaggcttggggagtttcttgtgtaggaccctccgagcactgccaaccaagctgggagaaactttcggatgaaaacgtccatatcactaggtcctcaggtgtatttttctgactttgtgcctactttcagatcctgagtcttgttttgacccatgacgactgcctttctcctggagtctaaataacaccagaggcagtatcattcaatcataacaatagctaacagttggtggatgtgcaagaatgtcgggggctctcttctaaaaacatttatgcatagtaatatctattcttcacaactaggcgagacaggtcttcttattagcccaccttatcaatgagaaaacttaatatgtttttccatttgaatgaggcttagggagatcaggctaatgggcccaggctaatgggctaatgtggcacagtgccacattgcagacgtgggttccaagccaggtagtcggtctgtccccagagtgcaggggcttcattgctgtgctgggtagtgtagttctcaaagggcagtctctggaccattgcatcaaccagcatcacctagttcatgccccagccttactgaacgacagctgtaagggtggggtccagcagcctgattttgacatttcctccaggtgattgtgatgcaagctcaagtttgagaactgctgctgtgtaaatgtgctctgtgcccagcaatcttcttcatcagcattatgttacttaattctcatggaggtcctaataagtaggcattatttttattttagagacgaaggcatgaaaatcagggggcaggagaaggaatttgcccacaaatactaaacggcaaaggtgaaattcaaatccaagactttttgactccaaaatccatattgttaatgcatattgatttcctgcttgatgtctagcccactgcttcatcttgctctctgggacatgtctattctctggtttcatcccacctaccagcttggggcacccggtctttgggttatgcacattctcacagcattcttacaaatttacccgcacctgtgtcatcgcgctggactccaggctctgctgtgtgccaggtctctgcattccaccctccccagcaacctcaggcttcttccagtaggtctggagatgagcacctcagtggcaaaggacagagcccttgtgtggaggttggacttcttcctcactggcagctgagctcttccaactgagtcaacctttctctttcctctcttccacctggatggccgtggcgcacaggacggacacagcctccctctgacctgacttttgttttcctcatgttaaatgctatcactcactcaaataatgctgtgtcttgtgcattgattattattagaagattgttttataccttaacagctttagacatgaaaagaaattgccagactccagggtatgtgtgtcctttcttatctgagtctgttcagtttccccacctgtctttgtgggagttggcattcttcatcttcctagctgtgtaaaatgcttttctctccagaaccaggacagttgaaagggattgagcagagcatcatttcagttcctcaaggccccagtctgccacctggctctccaaataccatggcacagccgcagcctgccttttgcactagaacccggagtcctgaagatgtggccccttccctgggaggctcatcttgccccttattctacccaacagtggtgggttcttctctgcttactgccctcaccccccacgcaccccaccctgaaaaacaaacctcttttcctcctcctaatccagagttaaacaaaatgactttggactttacagttcttccataatagattcaggactccccctgtttaactgatttgcagcccgggaggcgtttcctcccctaattcctttcatcactgccttgccctttatggagtgctttgctgagttgactgtggttgaagatatctggccagttatctgcaagatagaaaaagacaaatggctttctccctcattgatttatttatttcgacacacaccagtccagaaaaggatttaagcagagaaaatggtatggattttgtccccaggaaaaccttttggtaaagcaattttgattaacttatttgttcagtaattgtttattgagcacctactgtgtgtggggcaactctctgaggtactagagacctatgagtgaacaaagcagaccaaagccctggcctctcagaacttgtatgctagtgggagggagagaaaatcaacacatggctgaggaagccctgtaatatgttatatggtaattgctttagggtaagaggcaaagagatgatcaggtgtgtgtttgagggattgtagacttaaatagagtggtagaatggattcattaagaagatacctcataaaaggcggactgacatttgcatagctcggcaggagtactcctggcagggttcacagtgactgcaaaggcatgatatcaggacccagccggcacgctcacagaacatcaacatagccacatggtgacagaacctatttaaaaccttccctgtctgcactagactctaagcttcatgagggcaggaagcatgcctatccttgctcactgctatgtgcaccaatgtttagcaccaatttgcctctcaaatcatacacattcaatacatatttgtttaaaaaataagtgaataaaataaacatgagtttatagtttgagtacttgagcaagcatgctggaaagacatgagtttcgagtcagaaatggcagtcccttaattagtgatttcaaagaatgacaagttcaggccaatggcgggggtagcttatggctaagacagaggggaaggcccatgagaagatgaggccaggtaggtgacagcgcaggtgtctgaggactcatcacaaggagcgttgcagtcaccccagataatggctgaggctagtgacaagttgggctgtgagccaagtgtcaaagccctcgatgaatcttgagggactcaggatatcagtcattggcagaaaagaagagagggcggagcaacattgccaggtggcaggagcttcagaccagcaggagcagggctattcaataaaagtgtgaaagagaaaaggtctccacttgaggaggatcctccactacgaggaggatcatagacccaacctctgcatgccaaaacagacaactcaacattttcttgagaaagctaccgaggaggcactcccctcaggaaacagctgggtttcaataaatgaaggcagttcagggagcactctgcctgaaggctgatggtctcggggagcatcttgcctatgttgtgggtgttccagagagcccagtggatgggtgtggaaggtgggggagagtgaaagattggccagaagggggaaattcttttctctaggggaatgaatgggctggagagcctgatgatgttaggggagcaggagcagatgcacatgcctgtatgcaccctggcaataagagatgaggtgtgttggtgttaatcccacatgttcccagtggaaggtggtgaaacctcacctcacagatttcagcttcaacctgtgtctgtggcagggcagaaaccccttttcttcctgcccctgaaggtacagcagtggcagtaagtgggtagctctccataggccaagtcttcctgtggtccagagtaagaagaccaatcttcaggaaggcagtaaaaggtcaagggcagaggtcatgagatagtgggagtggagaagagagggtagggcttagagatatgttgggggccaaactgccagaacctgatgcttggtccaatgtaggatgggagtgagggtggaggacaggctgggaaagacgaccaggtttctggtttggcctcccttattgcctattcgggagaactaggggttctctgtccagcttttctcctgtgtggcaataggtagggtattatggacttgctgatgtctgatttatttctgcctgctgatccatgtgggttagctctcttttctacaaaaatgatcataacaactccagactcattttttaagagaagagggatttatcagattgaacagaaatgatagaatacagcagatatatgataaataggcagaatgaatcatcttttattcaatagatatttattgagtagctaaagcacaacagtgtatacttaggtgctgcagattgcatggtgaattcagcctttgcctcatcgggctgcagtatgggagtgtaggcaatattcaataaataaatatgcaacccaatgccagggagaggtagtgccatggagaaaaattaaaaaaaaaaagacatgggtgaagaaagccaggaggagctgcttttgttagagagtgactttagtgctgcaagaaagccagctcagcacagagcctagagacccaagcgagatgagacagcaagggcttgtatgaagagagggtgttccaggcagaggtaactgcaaatccaaggccatgagtggggaatgcatttggtgcgtatgaagaacagcaagaattctggtgctcagggaagtgatgtaggatgctgtgatgagagcccctatagtcagttcatgcatgaacctgaaaaccatgtgcaaaactgtgggacttgttctaataaaaatacaccagcacattttaagcaggagagcaaaataatttaataaatgtttccttttttaccttttttatttaaatttattttttattgtactttaagttctgggatacgtgtgcagaaagtgcaggtttgttacataggtatacatgtgccatggtggtttgctgaacccatcaacccatcatgtacattaggtatttcttataatggtatccctcctctagccccccaaccccctgacaggccctggtgtgtgatgttcccctccctatgtccatgtgttctcattgttcagctcccacttatgagtgagaacatgtggcgtttggttttctgttcttgtgtttgtttgctgagaatgatggtttccagcttcatccatgtccctacaaaggacatgaactcatcctttttatggctgcatagtattccatggtatatatgtaccacattttctttatccagtctatcattgatggacatttgggttggttccaagtctttgctattgtgaacagttccgtaataaacatacaagtgcatgtgtctttatagtagaatgatttataatcctttgagcatatacccagtaatgggattgctgggtcaaatggtatttctggttctagatcctttaggaattgccacactgtcttgcacaatggttgaactaatttacactcccaccaacagtgtaaatgttcctatttctccacatcctctctagcatctgttgtttcctgactttttaatgattgccattctgactggtgtgaggtggtatctcattgtggttttgatttgcatttctgtaatgaccagtgatgatgaggtttttttcatatgtttattggctgtataaatgtcttcttttgagaagtgtctgttcatatccttcgcccactttttgatggggttgtttttttcttgtaaattggtttaagttctttgtagattctggatattagtccttaaagaattactttaaccatgaagagaaagatggaggggagggggcgtaaagatagccagtaaaggcataaaggtatgccagttagaatactgttgatttcgtccatcaagaattgatgacgtcatggactgcagtggtaggatttgcaatctaagagtatgttaatctggaatatattctgaaactaagctagaaagttcattgattgattagatgaagtttgtgagaaagagctcagtattaagactgactataagatttgtggcctgggctgctggtgtataccatgctggtaatatactattcttgtccatcaaaaactccaagaaaagcatgcttgtggtaggaaagactttggtcctttagatatacaaatgaaaatgttgagtagatagttgactatgccagggagctagaaaaatgcatatgggaatcctaaccatacaggtggtgtttagagccagaggctggctatcccacatgcagcgtgaaggcagacaacagctttgtaggccaggaacagtggcactccaatagtccagtgtcaggaaaaggatgatccagcaaagacaattgggagatgagaaggaaatctcaaaaccagttcaaggagaatgtttcataaagagcaggtgtgattacagcacaagtgttgcttagaagtccagggagatgaggattaagatttggcaaaatgcacttatacacatgagacattggaaagaagggttctgatgaagacggtagataaaagattaattagaaagagggagaatgggttaaagaagttgagatagtaattaattttgctgagaagtttcactacaaagggaagcagaatatggagggtcagtggttggaggagagtgtgagttcaggattttttcctctaaagtccaatctgcagcctaatatcccttggtcctttactggctattattgcggtgtaattacttgtctcggtgttctctgttgttcctcctcctcaaataaaataggggaaagagttagccaagattggcctctgctttttgagcaatctatacattttgatcttcagccaaatgacctcaaaatttttatgtgtggcttttgggtgctctgggaatttggaacaaaagtcactatgttgctaaagcaattgactgtggctgacactaggtgctttgtctggaagtgagactatctgctgccagccctaatgaggattccactggggattgatagttgtggcacttacgggaaaaattgcttggagtgggaaccagcttataagaaggggcaggggacacagaacgatttctgctcatccccagtccctccccaaggaccaaggcagaagttctcaaagtcctcaatatttaaccctgcatgaccagatgctcacctgaagcaggggcgtatgaatgtatcttttttcaaaaaagatgccacagcaggaatcaagttaggcttttgaagccacccctctggcccacacacaagaagtcccctccttgtccaggagaagctctgaagggagtggaagtgcaggggcaacccaacgccacagaaatgtggacaaacactgcccaagtcgtatcctcaggggagtagggctctggggaaaatacctctgctctacgtaggtccatgccctgggaattctgtgaacatccctgctgcctcagtgctgtgaattctacatcaagggggcagaggaagcaggcagcctcagtgtttaggtttcaataatgttagggatgagggagagctcaccaacctggaaaacgtacctgccgccataccttgcccatctaatcttggcttccaggtgacttcctgggtattcatccaaaatgctcctcttcagagtcctaacaaacctattctcattgccaccattgccctagaggcactcctttcttggagagggaaagccagttgattgatagaacattgtataagatggggaataggagagaatagcttccatccctctctgtacccaccttctccccagaactcatggctcttgagaaattagagcaaattagtgagtgaccacagtgttttcctccacatcattctgctgtctttagttttgcttccagctgcccacactgaccagcccctgtgctgcttctgagcggtcacgttcctccgtgtgctgacatgtcttctctctgcatcaccagtttcctagacctcttggtttgggtcactcaggtgttgtcatggcaatgacatcctcagtagagtagcactgctcatgttgtcatggttatcaggacctcttgatgggagccccactgcactgttgtcatgcggagagcaggaaggaaccctaggaccttctggtaagcctggattcttaggctaggcatgagtcatctgtgcctgaaaatgaaggtggttatgattagggaaatagcagctgcctaaaatggtgagattctaactacttgagaaacgaataactgaaagagggatcatcatcctcatcaccgtgatcacctccttcccacctcctcttcatcctctgcatagtgtctgatatttttacggtagcttggctatgttccaggcactcttctaagtgttttccatttgagaactcctcatttttcttgacggccttatgatgtaggtgttcttgctgttcttttgcagatgagggaactgaggcgcagagcacgcacttagaccgcttgctcacaggtgctccctaacgtgcaatatggccaagacttaaccaggcaacctggttccagaggtttcactccgaactcattacctattctgtttcaatactaacaagaaaattcaagatgaatcaatctagttactgaaggcgttactaaattatatcaccttctttttggctagaatccatatagtttatattttttactacttttaagttttaaaatattttcatatgttcatttgattccaacaactgtctgcagttagtatgtctattaacggtattttacagaaaagaagatcaaagttttgagagttcataattccccaaggaaagttgacgtctaaactgtgttggacgaggtctgaattcatgacaatctgtagattcagaagctagtgttttgtcttgttctactgcatatcatgtcatgttatatggcccagagcctggctctggggaggaaagtggttcaaccatctaagataaatgggtagcagcagtcacctctatggatagaaggaccacatggcaagtcttggcatgttcactcaaggagccattcaccctcttttgccctcattattctatgcctaaaaattccactgtacagtagctactttatctattgccatataggcaagagagcagcaaccttccttccatggcaactgccgtcatagaatctgggctgccttgagcaagtcatttaacctgtacatgagaatcccaacagaaggttaattggctctgtctctaatataaatgacaattaaacacaaataagttacttagtagctggcctgtgagaaagtacagcttttaagagagaggaagctgagccctgagagtcgatgtatcttctcatttgagtacaaagggattgattggagggggacatgctgagtggggaacagcaaagctaataaagacgattataaacagtagcagcaaagacttctcattttttaaagtatctgacagaactttacctatatcagcatgtttatctttagagcagcactgtgaagtaggtaataatgtcatattattatctatattcaaaaaatagggaaagtgaggtgcagaaatgttagttaacttgctggaggtcaagtcagaggtggagatgggacctgcacccagcctcctggatgtgtctggcggcatcagcagctgtcttttctgcatttgaactgggtttcaggacctgggcctggagcttaatcaggggcataacgatgaacctcaacgctccctttctgctcaccactctccaagcagccgcgccttgcgcactttgcccaccctctctgagccttcgccatctcctctgtcaagttaagaccgtgataggatgtatattcctagcttgttgtaaggattatatgaggtaactcatgtaaatgcatgccggggcctgatataaaacaaatgctcaggattggtgtggtggcgcacacctgtaatcccagcacaataggagactgagggaggaggctcacaagcccaggagttcgagaccagcctaggcaacataatgagacccccatctctacaaaaaaattttttaatcagctgggtgtggtgatgcgcacctgcagtcgcagctgaggcagaaggatcacttgaggccagggggtcgaggctgcagtgagctatgaacacactactgcactccagcctgtgtgatagagtgacaccttgtctctcataataattgtaataataatgctcaataagtgtcagagtggtgacatcacaggtggtacacagagtgagcattagaattggtagttattcctgtcctcagcaaatgtgtcttcttaatcttaaagatgaacatactgtttatagcacagagtaaagtgccggatgtggcaagctaagatgcaaatgtccatcttcaagaccttttcacaatactccattttctctaatgcagagtttggcctatactattctcagatgacctgttggtacaagggctaccattttcttttggcagtgtttccaagtctccatgtcccctcaagtgaaatccataatgtcttctaagtttccagtggatttcaaagcctcataattaacgtccatttaatagcgatagcgaatgactgcttgttgctttcttaacatcctttcttttacaggtaaaagggtaaatttacaattagcagcctccaatttgcatagacacagaagttttattaagggagcaaaaagtgattgaaatttaactgaaagtaatactatgatctaggttttaataaaccaaaacaaatggatacattcttatttctattctaaaagggcattttattcaaaatgtgatggtccagtcttgaactgtgatatgtttttcgtcattgctgggtaagcaacttcctagccacattacacaaagtgaatttagctatgagctgtgagctatgagctggataccagtctgcccagtgacgagcctccttcattcctacttccataagaaagtaacttgggaatagtcagtgctgtccacaggccttgataatatcaagatgctgctggcctcatttgatattaaacatcagctctgacgctgttttcatgcacttttcaaatgaaagttctccccctgcctagctaatggatagggcagtgcagtgggaggagacccgtctgctgtcctccctaggcgatgtagctgccaagtgggtggaaggcagagcaagagagccaggaggttcacagcagtgtctctttccagatccaagggagacacaaaagggaattaaaaacttcacgttgcgttgttgtcactctacctgcgtctcgcctgggagagctctgcagctggagagtgctgagaagtcagcccttcagagcaattacaattcatattgactataaacttcccactgtgcgaggaaaggaaaggaggtgcttgccaagcgctcagaggggcgagtgtaaattatttcaccatctgatgatatataccacgttggcaaacattaggggaaaagaggaggagagaaagcaaagagtgtggggaagctgacaactgatctcccgcattcatgaaaggaactgggacccgggcacactgctgggacaggacgagtcgcccacctgtcgctgctgcagctggcttgtctatggtctacacttgggtgaggaaagcttttaacctgatgtcccagctcacacataactagaggagagggcagggaatacggggaagtgaagagcactttggtcagaacacttggtttgcctctttgctctgccagttactaagtgggtgactcttaacaaaccaattaacttctctgaacctttgttacctcatctgtaaaataggatcagaatatgaagattagcaacagtacattggaggtgctttgtaaacatgaacacattacgcacattatcctttattaaaagttttgtattaattatgcatattcttttgggcagtgccaagaaaataaaaaaggcagacaggagaggtgtaaacccaccacagagcaatcttctaagataaaggtgtttttacatttttgcaacacaaactcaaaaagcaaaaaacgtaagcggcgtttatgaccgttgttataacaacagcaattatcatttgttctcattatcgtttgctaactcctgcatttatttacacagcacaattaatctgaaagttcacctaaccatttcacaaatgctgtggtggaagggagtctaaggaaatgaagagagttgaacgttaggacacagctgggcagtgcaggaatcaaaaggtaaatcactgggcaaaaggaacaacgggattgataccagttttagaatggggccagacaggcacggggactcacgcctgtaatcccagcactttgggaggccaaggcaggcagatcacttgaggtcaggagttcaagaccacctggccaacatggtgaaaccctgtctctactaaaaatgcaaaataaaattagccaggtatggtggtacacacctgtaattctagctacttgggaggctgagggaggagaatcagttgaacctgggaggcagaggttgtggtgagccaagaccgcgccactgcactacagccaggatgaaaaatatctcaaagccagtgttgactcttattgtctcatttcatgtcactagggatcagcagattaaggcaggtaggtttacgaatagcttgtgggctcacaatgaatttcatatttttaagtggttgaaaaaattaaagaagaatcatatttcatgacttgtgcaaattatttgaaattaaagtgtcattgtctctaaataaagttttatcagaacacagccatgcccatttgtttatgcctgcttttgtcttacgatgtcagagtggagtagttgcaactagattgtaggtataggttggcaaagcctgagatatttattatctggtcctttagagaagtctgccaatccctgcactgcatgaacatggactcctgaaggttctgaacactgttattaaaattcttatttttctccatactccctttttgttgcctttcctcagcactctgtgaagttgcaatgaggatagttctcacatccattccaaatgatgcccacttctctgtcttccaagagtggcccctgccaccctccaggggtcctccctggcttgtagatgttgtgctccagtcgacagctatggctcaccttattttcaacctcagctacaacaagacactttcttgcctcgtccctgactagtcatctctgcctccatcttcattatgcaaacaattctatatcctgcccactttggcttttttggagtcattcttaactggggttaacaaaaatctgattcttgccctggatctttggttatgctcactggtctgcagttggttctggttctatctatggggaagtttgtttttggatagtggcactggttgctttgtttctgtagcatacagcattctgtggcagcatctgagtcggtcttcgctagtactgccttagagagggccatcatcttcccaggaggagcacatttgcctcaatcagcaccttcaaccaaaacatatcattgcatactccttatctctgctggtttcaaacccatattttaccatcaccaactcttcttcctgcctcttcaccctctctccctgttttctgtctggaatctctctgtagcaaaagtttatttgtgaagcagaggtggcatgccttaagttgaccagaagaccatggtcaaatgagccctactcaatttactacatttcttttgaattccttaggtatctcctcaggacctctcagaatcccgtaattacgatttcataatttcaaaaacactttacacgttataataataatgatttcaacaagaagagaaagggaccactttgtcatagagatttcttttctattgagatggactttgaaatcttgtcactttcaaaagtgaatctcaatttttacatcaaaaaattactagttattgttaactgtttgaagtatgtgtcatttatattcttctacataactttgttacttttgaaaatgtgtaatatgtgtttgtgtcaatcttgtagtcataaactgagcctttagaaatagattttcaacgttagattccagtaagatatgtttagctgaaacagatattgaattaaatcaggacgggcctttggtgaaccagcaggcaacatgcctgcctgtattaatgtggttctcccctttgctgtgatgcagagcgctccatatgatctgaagactctgttgtagcagcagtctgactcatgacattccctagttgtcaatgggatgaattctggaatgaagcccagattctaaagtcaacccacatgggttttctaatgcagggggagtcatctctgcttccatcttcattaaataccattagaatcatcttccgacccctcaaggagatgagaaatgttggagcctccaatgatgcatcaataggaagcaaggtgggttatcaaacccccatcaggctttaagtgttcactgtgtgtgggtgtgggtgtgtgtgcatgtgtgtgagcgtgtatgcatgtgtgtgtccagtcatcacgcatctccagcctccagaacgttcttcctcttgtgttgtaaactggattgaaaggtggtcacatttcagaattagcagatgcctagaatgtagtacttttggtagcactgaaataggagaaacaaaactataaaaaggaagttctatttctttcctacttttctttttcttcctctccctatgtagcactaactcatttgccctgcaaaagtcccttgggctttttatcaattagctgaggtaatgcaggctgagccacatggggctcagagaccaccctgccataagcatcgacatctgacagggtggattttccaagataattccacacaattctatatgggcctgtttattatcccattattagtgtttttaaaagtgaaccccctgggaaaattttcaactgattaatattcacctctggcatatgcagtctatttgaacaatgtggtgtttttgacaattatcagaactacttagtatacccccaggaagtagtcagtgatctgccattgctgtgaccctttttggaatacatgtcatcaaaatgccttcgatttggtttaaaaagtcagccctcaattttttgacaggcacacacacagacacacacacacacacacacacacacacaacaaaattgtataactcgcttaattcatgatagtttgagccaaatggctgtttgcaaaataaagcctatgcttgaaaatgatttcgttgtcattgaaggcatgacaaagtatcattagccaacttttctggagcatttattctttaccaagcctgagtgaagtgctctacatctgtgatcacatttaatcttcataatgaggtaagtaccattgtaatcttcattttacagataagaacattgaagctcagagaggtttggtgatttttccaaagttatatagtaataacttttgtggcaattttttagtagctcatatcgtatctatagaaactaattttacttagaaggaaaacagcactggggaaagataatagacttggaatcaaacagacctgtgtttccatctgcttcacatttgtcagccgcttctccaattgtaacttgggaggaatatacacctctaaaagtgggacggcataactattccacatccactgtaggcataatggagcactcatccacagcagccatgattactagtgttattaggatgagaagatggggagagccttacctatacttgaatcgacagggatggacagagcaatgaaaaggttttgaatcaaaatcagaggcagggaaaccatagcactgctgtagaaaggcagagcaagccagactgaagcagtgggctgtgctagtgctcagaagtgtccgagaattctttgcgccactctcacccgtggcagtctaatctcccggcatggagaatggctggccttactgactccctccgaaagaatggagtgaggtggaaggaaggctgtgtgatgtcgaaggccaggttaccgaaggccacacagcttctgctggtttttcctggggacaccacatggcgagaccttcaagagaggggagaccaggggcccagatccccgggcccagctgtcagagtctggaagtgcagcagccctagagaggaccccagtcctccacgatctggccagaaacctcatggaagaccctgatgagatctgctggttgagctcattccaccccggattcatgagcagaaaactaagatggccattgctggtgtaagcccctgttttggagccatttgctcctcagcagtaaacgtccggaacatgggtccatcatcctgaagaaatgccagatgctaacttagatgtcctgttgtcctttgctcctcacgtcaccttctctgtccctctgcacttgcttcctttggtcaagacaaggtggacttacgctctcggctccacgagggcctttccagtgccctcagtttgcgatctgacctcagggtttttctttgggatctcggtacgtcacagtgatcccagagtttctgtcagattcaggtagctctagaatcacagagtcctgaaattttgtcttgataattagctctttactctctcagcctttgggccactgaccccatccaaatggcggaaagtgaaagaagccggtcccgtgaagaggtctacgttttcagcccgtttgtggacattctcactgcctgacaaagccgcactcagtctcagcatctcaggctgagggctacactgtggagacggaggtggggtgcgtcccaatgctagtccctctctctggaacccacaggcagaggcctcaagccaactgtcctcccctgtaaatcagaagcagggcaagtaaaagcttggatgtcttcgtctctccgtagccagaggaaatctgggcgcgcagagagatttggagtttcatcctccccgctcagccagtcccaggcctcggctccgaggaaattcgctgaaccctttcaataggcttgaattctgtcggcagcccaaccatccccttgtttactgttgaaataattactactttgccataatattagctctgagccgtgactccattaccattatcaccggaatattacccatttattatctcccagcaaccctggaagatgaatactgggcttcagagaccaattgttttacagcagacaggatcttggtgtgcattgtttaatgaggtaaactacattacagccagcattaatttggctgcagtgcactccactaaatcactcttaacctggaaatctgccactctttttgatatacccttaatcggcgaggatgggagacatcctttgagaagaggctggagctgaggggagaggagaggaaaggttacaggtgagcgagccccgcccagagatgtgtgcataagatgggggaggattgtggagtgagggaccaagggaggcaggagaaggaagcaggcagagggcacgcatcctctgttctgctggtcccaaacgcctgggaagaggcaaaggtgatatgatggctgaaaataatccacatgcctcccctctctaagctcaggagttatgaatccacagaatccattttctgaccacatttggcttttctcttctgtttggcatcttcagaatcaccacagcaacccacaatagacagaagacagaactagacaatgagattgtcttttggcatgaggttgtctttcggtatgagaggcagggcagcctcccagagctctggccatttgctgagctcatagcagcctgcgtgtggactcgcggagctcattgccttaggtgaaacgcagctggagacacaccaagaaacagaggagcagatgaaagaagtttctgcataaagcctcccttgtcacttacattcttgctgtaagctgcataaagtcacctgaggactttgttaaagtgcagattctaattcagcaggtctggggtagggctgaaaagtcttcatctctaagtggctcccaggggatgctgatgttgcaggtccacagcaaaaggagccttgtttctctaagaaatgtctgcactgccttgttcaagatcatgctccatgcagtctaataaaacagcagcatagctaccatttttgaggtgggcaaacagaaatgaattccttttgctccatcaaatgctgacaacatctatacaggtcctggggtgaatgaagcacaaaaacttctcagaaagaatatcccagatacaatagacaccagagacactgccgtaagtcggtgacttcagatttttagggcagagaacattgtagtcctaaaatgtcgtaagaaattacttttatattaccaattgagaaagaatcgaaagggcttgaacttcggactcttggaatccaatctaatgtttttctgtaaagagaaataaatacattttctgctatgccactggtgagtttcccaaaattatctgttttcctgatgttgaaaaccttttctctgcacagcctaaatgaatttaaaacttaagcaatcatcccataaacctagcccaggtaatagtggttgaaattttaaaaatggtttattagaaaattccagggtttcttctttaaaaactaaggtggggctgttatgtttctcaaagcctctctcagtttaccatgttcatctgcccaagcaccaccatcattgcattttactgagagagacagaaaaaaagtctttgtgatttaatatgtaatctcaagaatagcagaacttggccaacggtataaattgggaatgtcttttactgtacatcttccctcccaaacctttttattgtacccatcttgaaaacttataatgaatagtttttatctccggccatacatatgaagtgtgaggggtgtgtgtgcatgtctgtatgtgtgatgtgtttcatcctctataagagtagcataacaataataattcttcttttcaaattttatcacaattaaaggaaaaggacatcactaatttattttcatattgtctaccaaactgttccactagtgtttggattacatttatctggtttgggagcattatgcctctcctagttcatttatccatccattcatccatccaaccacccatccatccatccatccatcatccatccatccattcatccatccaaccacccatccatccattcatccatcatccgtccatccctccatccctccatccgtccatccatccatccatccatccatccacaaacatttgcttagcatctgctaggttctggtaaagctggaaaaacaagtaaaaattagaaaagtaaaaacaaatgagacatgatttctgtctttggggatttcataatttatcatgagagacaaatataaataactttttgtgataccatttggtggtgcattttagtccttctcttttttcctcaactctgtaagcagttttctttgtagagataatgtctaattctttttattgaaccatagataaaagacagagtggaatctagcagaaagctcagagtataaactgggtctaattttgaaatggtgattctaacagtcttcttgggtgagtctccaatacaactacaactccagttctttcttgtagcgtctccaattttaaaactgggcattactaacttgactcttccatctcaagaatgtttttacatattccaatgagggattgtcctgttccaaacatgggtggaaccctcagcttagctctagagagcagctgttcgctggagactacgcatttgccagaaaaatgccatcctgttgaagatactttgccactggctttttcaagcacccaaaaatggaagactgcactgaaggaaatttgttcgaaagaacttgagagattagggggtgaaattagatagagaaaaaaattctaaacacgttgagatatgtcgtcagtaaaatgcgctttggcataacaaagttgtgaattgaaacagttacagaaatattgtggctggggaaatcccaagtgtttctacagttgaacatccctgattagaaaatccaaaatcagaaatgttccaaaatccaaaactttttaagcactgacatgatatcacaaatggaaaattccacacctgacttcatgtgagaggtcacagtcaaaacgcagccaaaactttgtttcacacaaaaaatatttaaaatactgtctaaaattacctttaggctatgtgtataaagtatatatgaaacataagtgaattttatgtttagacttgggacccgtccccaagatatcccattatgtatacacagatattccagtatttcaaaaaatccaaaatctgaaacacttctggtccaaagcatttcacataagggatactcaacctgtattagaaaaattaagaaatttgccttctgtaaactttaatatatgtatttcatatataacaaatttatatataatgttttttccttttggcatataaagcctattttatttggttgataatcatgtgattggtgctctgaggccaatttaaccgtttttactgaatagttaccatgtgttggatgaaatgctatacaattaactgtaatattatttagtcctcatcccccccagcaatacaattcagtgacgtctagttacatgagccaaatcaactaatgggatattttcactgttgagcagggacatacaatcagagtaattcaaagtcgtaaacacaaacagcacccttttggtaactggctctgtccaggcatgctcacctcttgccatgacctcttgcatgtgtctctgtaaaatgaagctgataatgaattgttccgtactcctaatactaaaaatatctgtgatatagatgtaaaacttctggggtctttcttaaaagctatcgtgaaagtgcacaattattttgcatgtttgtatacaagcctcatatccacaagtgcacttggatgcaccctccagtcctgctccctgatttatagtacattcatcaagcccaattgcccatacacagtacaattctctgttaagaagcagcatttgggaggaaaatgtaaactagcctttgttgtgatggtcgcagtatgtgtgtgctgtgttttctctccctctgaggcaaattactgtgagtaaaacctatattatgctatcagatgcaatcccagcctttgctcaattgtactttgcaatggcacaatagattgtggttgtttgatgccatctcattcggttatttttctcacgtttgtttgtctctcagctaatcggaagaattcaagagccttcagtaggcctctcagtccttagcctcagatcaactagtggagccttccccatcctgggtaaccctctggaagtcaagctgtcttgatttgcattatcatctttctttatccgctctccagagagtccccatcttaacaattaaagtacacacaagaaaatgactgaggatttccttttggctttcctggaaatggaggatcaagctgagtaaattctccaagcttctcaatttgtgaagaaaaaatgttacatttaggggaaaaaaggggggctcctgcttagttaaaaaaatggtgggtggggacagagtgcaagagggagaaagaaagaatagcaaagaaagaagaggtgtcatttgggcgtctcgctagtttttcttctatcctggttatcaaaagagcaaagaaattctacttccctttcccctccctcaggtgcccttaggcctgcgcagcctgggctgggtttgcaccgctttcacacggcccgagtagccaccctgtttgaaagtaaagcaagagcagccacaaagtgtctgagattcatgagatcactccacaaattaaaaccttttatcagcctctaagagctgtgcaaactaattagactttggccgaactttgccaatgactccctcgaggtattattataaaattttgagcttggaaacgcgtccccattctgtcaacatcaggttgtttcagctacagaaatcgagctccagctcattttagcttccatgatgtgctttgcataatctgtggcattttgcactggtgtggcagggaggagagtagcacagctgtatttgaaaacacataaggatgtttcccagcaataagacttcagacacagggactgaatttcaagaaaaacccatttttgcccctcaattttaagaagacgctgcagagttcttagcttaagctataaaggtgagtactcaacatccaggtctaacagcttctaatttagggaggacatatcacttcccttctcaatgtttttggctcttcatatgcaaatgaagagctcttactaacaaattactgctcaaatctttgatcatgttttgaagcaaagtctgagagaggaggctttctggaagagcttggtaagaagtcagtaaactttgatttgtctcagagaatttaggttcataaatagcaagggtgcaaactccatgtgactcaacaaatatttgaatttgtcattcaaaaaatatcaaacatatataggctatttcgcattattgggggtacgtcgaggcattgacagtgccatgtatgccagtggagccgttcctactcttgctctgaataattctctgtggggctggcctgggagtgcagaatccctctgcagcagatgtggccttctgcacgctcagagccccaggacacagtggacattgaaggggaacagagaagtagagggtttccctcatccttagcccatgcctggagcagggggccaggaaatgagaggtggtatttgtttcctttgctgaaaatggagtgaggtgaccttccgatgtacccaagcaccttatgacagtgtgtttttaccacttcccagaactgaccatctgcccaacttttggaccaatcctgggccactggtggagccaggaagcctggagggtcatggaaggggagactcttgcccagtagtccacaagagggctatgcagctggcatattggcccacagaacccccagccctgcagcatggccctgagccctcacaggcccagagcagaggcaggagtggaggctgccagggtttagaccctccttcactaaagggtccccaggttcatttttgtctccgccgtctgccatcccgtctcatgggctctcatgatgggctcatcaggttcttgaattctttccagttgtcactaattacactgcagatccgtaaatcattccaggctggggctgacagggagagacgggccctctgccatcctgagctcggggcttcctgccacacctgcagccagtgaccctaaggcagccgctgatcagtgctcagtgtagaagggagggatggccagtccctcagtcacccatccccaggctctagccctggctgtggccacatatgtgtgctcatcctggaactaggtctcaggtaatgcaacccctggaagaatgcagctactgtctctgcctatgggtttttattgctgtttgaatattaaagacagctgcgaggaaaggtgagcttatttcatctggagtttgataaagttgagacagcactcctcaaacttagtttaataacgcaacagactgattcatcaattctgggattgggtctaccaatcttcattttaaatgtgtaccccaggtgattcttgggtggtgattcagtaccccactttaagaactactgtacactaacttacactttatctctctctggctctaggctatcattgaccctcttgtttctggatcaggtgagaaccttctcttttcaaccttgctattctaatagggacacacatgtcttctgatcaaaaccacactagcttctctgtacataggagctattcacaacgcaggtgcacaggcccctatgcctgtcactgagagaaagcctgtgacctctgggtgttctgcagccagtgtggtgggccgagagggagcccccagttcccccagcccaccggctcactgcacagattgctggctaatggggcggagctagctgaagtgccttctattaatggagcagaatataaacagaataaagccttcatttcccaggctgtggtttcattattaatatacttcacaggttgtacgtttgcgcccgtgttttctcagctggtgtaatctgcggctctgagtgagaacagtcataaaattttcatttccagttgaatgtgcgtccaattcgccgtgaaatgttctatctgtcgtgaatattaagtgcactgaagcaatggctgctggattaggcagagaggttccccggcccctgccaggcctggcagaggacagaggtttgccggggcatgggtggaactttaacagggaagctgcaccgtgtgaagtctgttttcttgtggccgcctcctggagctttggtggaagagaaggaacctactgtccaggcgggggagaggtcagaaataatggagactgtgcacctcagggccaataaaaagcattcagacgggaggtgaaagggcacaggaagttcaagtgcagagtagagaagtggagggccaggtaatgccaggacagaggtgaggagggaggggattgcagaggagagagcaggcctgaggggagcgtgcaccggggaggctggttgtcaggcataatattagaaagagcaagcggagcattttatgcacggtgcctttttagatacatcaattaagcgctgaggagagagcacgatggaggaggtgcagggaaaggctgggagtgacagcaattaggagagcctttctgtacgacggcctgcagtcctggtgcggggcagagcgtcacggggactctgtcctaagaacaaatgtttcccactgccagctggcctgcagtggatgttatttgcctcccagcactgacttagtatcccttcccctcatgccactactcggctcagccatgccagctggctcttccctccaaacccttcctctcctctttcttaggagttgcagcattgtgccagtttcagggttgaaactcctcggttgctcccacagtgtgcagagagactcggggagccaaggccagtaggagtagaaagcccgcaggatttgatcttctctactcatcccagctgccgcgtcaggatcttttctccccgggcggccacgtgcccctgtcctataggggtttgatgagagagctgccccgggctagaggagaatgagaggcaaataggaagactgagtagagaaagtggagtctccttgccttgggcccacagcctccttagcagcactgagcggaactggctgtgccctgcaggagaatcccaggaagacacccgctttgttttcccagaactaaagtgctgattcaggcaaaggggcctttgccgcacctcccgcacaggtgggactcctccaagcctgcccggtggcccacggagggtgtgaatgcctgtgcgcgtgcgtgtgtgtctccaccgacacaatcgcacagtgaaagtcaaacagttcgttctatatctcttggctttttacagttaaagctcccaacagcccagtgaaacagcaatggtgattttcctcctttacaggtaaggagcaccgcacggccacagattaagtgattctgccgaggtcacagagctgaactcccagtggaggcagaacaaaacccttttattccaatctggagccatgtgcactctccccctcctccaattattgatagttgactccctctctggtttccaattgttttgctttggataatattcaaataattttgtgtttctgaaacgcacacctgcggtgaggagtgagttgagaggaagaagctgaaaaatgagctgagctgagatattaaagtggtagaagaagaataacttaccaagtgacatcctaaacacatgtagttatagctcgggaaggcatcgtctgtttcgtatgtcggccgtcctttcacacgccagtcacataccgactcaccttcattgtgagcagaagccttgagaacaaagctcagcatccagcatgatgcctacagcaggcaagagcccggccaccctctctagccccaggctcattccctgcccttgctccccactgtcctgcgtcttcccagggtggactccagacatttaagctttgcagatactgttccctctgctgagaaaaccactccatcctcctcccctccccaaacctggtgcccaccctcacatccttccagaggcagcagacaggctgcctctttgggaaaccttcctgggcaccagttttcacccccaagtgtggcccctcctcctgggctccccatgaacttgacatgcacacatctcaggctcatcattgatcgccctgtggtttgccatctgcgtgtatgtccagctcacagaagagacagggaggttgtcagagaccctagaacatccatccttggacacatactcagggcctgggcattggaattatacaaatttgggttttaagcccaatgttgccgcttagttgctatgaggctcctgatgaatcacaaaaccggcttaggcctctgtttttacatcgcaaaaatggggatcataacttcctcagaggcaggttgtaagcaagcaatcagtgaggaaatatatacgtgctatagaaaacttagatacttttgcttcccttctctttaatagatgtctcttctttccaataaatgtttactgggtgaataaatgaataagaaaaaaacatataatgaagtgcaaaattgtttggttcagactcaaactatactggagattcagaaggaaaatatcatcaaaaggaagtatggccagggtcttcaagcaggaggtgggccatggagggatcctggattcggggataagaaccctttaaagttggatctaggagaccaccctctgcacattctcataccttcctcctttcctttccttttggatttcccttcttttctctgtctctttctctatccctgtctcttttctactctctgatttctttcacttgttggacctgaacacttagtagacacttgctacctcattttaccccctgtgtatctctaatcttaaatctgaactagttaacccctgagaaaggtcatttccagctcttaaatccttggattttccaagagcctcaccttctctccacaggccctagagagagcacctgaaatgccattaaatggtcacagcccacagcatccaaacatgggagaaaatggagaaattaggagaaagtgctcccaaaatgttcttgtctgatgaatctttaattctaccccttgtgactcagaactcctgcccttaaactgcattcagaatgcatttcgccagtgtcccattctcagggagggagagacaggggaaaaaactgctcatccttctcctggcttgtcactgtagagttgagataataatagtctttttctgatcccctgaactttcccatctgcttcataaaacaatggcaatttttttcccttgctctgtcttcctctctctcttttatttttatcctcctacactataatttaaaactgtggcagtgctatagcccttgaggttttttttttctctttcttctccccttgctttaatacatgactgttatttaaaatggcctttcatctgagcaccaggaggctgcctgagcaagctgcctcctgcttttagagagggagggtagggccagtgtggtccctggtctcacctagcacctagttctcttcagtactgccatgcaaatcagaagtgttgtttgttctttctgaaagaagacatcggaagccaaggtctggaagtgcccctccctcagaaatggacgtcatatcaagctggtggctgtcagtggtccaccacgcatcaggtctaaataaagcaatttcagctgaaggcagtaaattcagtgtgcccattgatgccaggagggaaacatgtatcagccactcagcatggagactcagccgttgctatgcaggcttttgctcagctgcactgccaatcaccattcagatgcatctctcctcagctggatgggcactgcataggaaagggtggtggtcagggacttctttcccgggggaaatgtcatctgttttggggatcagaaaggaaggtgtcggacactggtgtttcccataccaactctgcagccttccctgccatggatgctcgttcagctgctgctttggagcactggctggaacatgctccacacacttcctgtctctgtgacagttcagttccatgactgcacctgtacctctgaaagtgattttggccttgtcttttctctccaagctctctccagagccccctctgaactggcatcagcaaagcaatcatattctaaatgagcttcatgaagaatatgccattgcagtaaaacaccagagacaggataaggctgaaggctagaaaataaatcgtgtgtgtgtgatgagagggtgtgtgtgtatgtgtgtgtgagggtaaggtgtgttccagccctcatgaacgtggtgatcacttccttcttgaattaagcagccctcctgtcagctggagaaagaactccctggagaaggcagggaccgcctatccccagctgatctgctgaggaggccacccacctgcaggagatggacaacattttaatcctggctacgtgggttgtttccttgtgtgatgcccagaaggactggcggcaggaggaaattcctggagaaattgtctcttgagtcaggttgttggatttcaaatcctaggtgtcattgcttcagtccctccttctccttagaatcctcctttcctttaaacactggaaatgattcttaaaaccatgtacaactattaaggtgagaaaggctgagaagtcaggatccaggattttctcctgaatgtgatctctcaccctgatgtggtgaaggtcatggcctccagccaggcactttctctcggttttctcttcaactcattaaaggaccattttaatcaatgtttttaccttccccccgataatccaaggatgtccaaataattttaattttctctctcttggcccaacttcattgccattgctggtatatagcttaattaacaatctattttaagatattgttttaaatgattttcacttatcaccaatttatcaccttctttctgtttatttcttcctgcatcttagaccttacatctgggattattttccttctgccttaatcctctttcgaatttcctctgggagagctctgctgctagtggcatattttctcagtttttgtttagtgaaaatgtcttattttgtcctgattcctgaacggtacttattctgatacagaatgttaagttggaagtcattttctttcagtttcctaaggaacatttggctctcagttctgctgttgagaagtcagctgtcaatcttatttttatttccatgaacgttttctgcctttctgcccaacctccaacaacccctgttgcttttaagattttttctttggatttggctttttgcaagttcacgatgctgtgttagctatagatttctttctttaacttttcttcagatttgttagtattctggaatctatggattaatttttttattacttctggaaaattctcagccattgtctcttcaaatattgcctcttgtccccttttccctttcttctctccttttgggactcctcactaaatgtagacaagacccctccctctgtcaatgcccttatgcattgtttggcattcttcatctctttgtctcttcacactattcacttttttttttttcgttacttaacttacagttaattgattctctctttagctgtgtctcatattcttttacacctttacaccagtatttttaatttttcttttctagaagtcctatttttactttttttcctcaaatatgctagttacctttaataggtttattttccaatattattagtcaagtttgtcatgcatttctttatataaagatatttgttttacagtcaatgtttcatgattccattatctgatatatttgtatatgtttctgttttctattttatgctgttctcactcttagtatcatgttttcttgtgtgcctggttacttttggctctgtgaggctcattgtatttttttacaaaaagctgaaaaattttgagccctaaaatgaaagcaccttccctaaagaatgatttatatttacttctgcaagatgaccgaggtctatgtaaactccattaagggtgtctaatttctgagctagcccaggtaattcaaaccgtaacacaatttcttggagagaatgtttgtcttttggttcactcccaccttggggatgcagctttttgcagtctccacttattgtacagagcttttcctgttagactccatcacttcaaaagggtgttgggctttgattcctgttcccctgtcctttcagattgtcaaacaaaggcttcaatttacctgactcagcaaatgccctcaggtcaggaaccagctgtctcttggttcatgttttatctttaatttagggtctggtaattctgtaccaggaaggaagcttttgatacttttaagaaagatgtaaactgtctcatccagttcctttggtagttttcaaagggagggtagcctgaataacctaatctgcagtacctgtttaaaccacatcgcacatctgctctccatccacagcttgaaacttccttatgcgatgatgagcctacctatgaggaaagggcaaggcatgtggaagccactccactgctcaccagctgtttcactttgtacaaagatcaaagtttatatctttctgtgtctcaatatccttggatgcgaaatggcgggaccaatagcctgaagtgcctgtgcctaccccacagggttattccaaagctcaaaatgatcctcggtgtgtattttgctggactcagtggtacgtatgaatgtgccgtttggaatttcaagcctactacttatgtgtgggacttggaattttctggcttgtcaaagaggggagggccaaagggcaaatgtagggccaggaagaggcgcaggcttccacccatgagaagaaaatctttaggctaacagtgacaaagcacagcagcagtaaagcacaggtgctccaaacctgaggcttgcctcaccctgcctttccgcccagacagagagtgatgactgggaggcaaggccgtggccttctgtttggaatgtcttgaaagcaggtttgtccttggagcactccctgccataagcccctcagcctccctcctacctctccttttccctcccctcttagccagggctggccgctcagcgtcagttctacttggcaggccttcttttcctcatctttatcttagcatttgtttcccatcttatgaaaaattgcttatctacctacaatcaacctttcagctcagctccctatcagctcctttatcagctctaccatcctaacttctcatttgtttctgacaggcatcctgtaacaaattcttaatttgatgagcttgatatagcccactggctaaacagtgagctgaagccagggctggctgcaggaatatcccatactgttcagccacccattttcttgagagcagagagtccccaaaaaagggtggaaatgggagaggagcaattctgtggggcatatggcagcaggaaaagaaagcctggaacaacagttttccatggggaagcctggaagacagtgttggacagaggcacctgaggccagagatgtagatgggtagatgaataagaagttggttaataaaagagagagaaaaacaacttgcagctttgagatacttcttggtaattatagatgggaaacacaggctcggatacatgaatacctgggtctttttgtcctgatatatggctgggtaatcagagcagccgtccatgtgcaccatgatttctgaaaccattgttcagagtgacattgactgtctctgaaaggttaatgggtatttacgtagggaggaaaaatgtaccttggttaaataagtttaagcaactgtgtgtgctccatttcccatttggagatccataggatataagaacttaaagattctaaaaatcctgcccttgatctaacgaacccagtttccccagacttgtgtgacaaagatgtcctctttgcagaatactaattacagtaccgtcttgcaggatacttagaagaaaatgttgattctaaagccatagtaggctctgttttacctctgctgctattaagggattctctgtccaacaacaatgtttctagaatggtaactgtgagcaaaatgtcctttctggaacacatgccatgtcctggagcttaggatctggtaatcttctatctcactatctgatgatgataatgaccccccatttattgagggcctgttaatctcctaggtgctttttctatgcatgacttctaatcctcactatgatcccacaggagagatagcattaccccatttcttctatgagaaaattgagagtcgggcttattaaataatgtgcccaaggtaagcggctaagccaggatttcatccaaggtctggctaactctaacataatgtttgttttcatcacactatacccattatgaaaatggggcagatttcaaaaaacagagaagaatgatttaaaaagcaaataaatttagcagcctgtctagttacatacaaggaccacttattgattgaatgctagctctaggaaaacaaaaatctgaaaattatctagtcctattgtttatttttccccttgtaaataaagaaactgagatctgtagaaagtaaaatgacttgctcaggctcacgtggccagctggtttcagagtcaacatgatcactaccaattaccctgacttccagtccagagttacttatacccatagtgactttttccccctcctctcagagactgtttttcaggctaagacttgccaaaatgctcaatttgcagtgtgaagatgataaagacctcctcaggcctgccctcagctcggcccctctatgaggaggcatcaggaacaaaggctgtcctttccatctgcatatactgaggacctcgtgcagaggacataggagctcagcttgccatcgtgctgcactctcctgagttctccctggatatggagtctggagaaatgaggcagtctctgcaggtttagctgggaactcaagccaagcaggggctggaaggcagctctctggactctgccaaagcctcctctcacctggtgttgtttgctatccagactcttcctgtccaccaactcttctagatttgagctgccaagtaaagccggcagccaggcacttagcccttagacgcactgacagggcctgtgtgttctactgagcacccggctagagacagaccttatctcctgcctgcccctccctggggagtgtctccccgcaacccgtcttcatccccagcattcttcaatctccttctcgcccacttgtctcctggttgcttctcctattatttctgtgattcctctcttccttttgtctttatctagaactgttgctttgtttccccctcaccttttcccatgtttcacagaaggccagtctccttttccccacgtctctgtacacacccactgtgaatgcactttgttttcacctctcctcagctgctcagtcctcctaagtgtctctctgtgctccgccgtggcattgttctcaagtcccatctaccgctggccttcctttggccactcttccctcattcctttaattttctttgacctctttgtatatttttcttctccaatgtgatcccttctctctctcccacttctataaaagactcggtttctgcatcactggaagaccgcaccaccattctgtggtgatggtgatggctgctgggttaaaggaaatcagtgtctcctcttctggatgggtttggatggtttccagtgaggtcagaatcctgttgcccctgctgggattctccagcctggggttctcattcttggcgccattgatatttaggctggcgaatttcttcttgtgggggctgttctgtgtatgatgggataccgggcaacaccccttatctctacccactagatagcagtaacaagcacatcccaattgtgataaacaaaaatgtccccagacatttccagatttcccctgggaggcaacatcttccccatttgggaagcacagccctagcccacagcctgcagccttgcttctagaaccacatgcggagttgaggtttctatgcctgttggataagcagaaaaagatgtggaagtggtggatgctgtcagtggagacacaagaagtgtgtttgccaagataaatttgagcctgaacattttttttatctctttggtttgagtctgatctctttctactcctttcttttagctctttagctctcttttggctctcttttagctgtcttttagctctttcttttagtcttctttcactgtaatccaaacttctttctctcctgacaatatgacgttcttgagttgcagactgctaaaaacggctctgattaagccctttaagtgattcctgcagaagtggctctgacggtgttccatctgtaccctcagaaaggtcaaggtgtcactcggctgctcgagggaactctgcttctgggctcccaggtggttaatgcctgtttgattagctgtaaaacaaaatccagaaaatgccaagaggcaaatctcaattcacctttcagaatgaagctcactgcccagtcagagaagggggtgcggagtgggtggtgagatccacagctgttaaattcgcaacaggtaagccagcaaatagactcagtcctaatgcggctgccctcatctgctgaaccacctgagtcaccttcacctttctgctgctgactcttggctggaatgtggttcagtcctatttgctctgctttccatgcagctctgccttccacttgggtgcccacttccattccagtcagcctcccccttccctgctccactgccgtcctgttgctttccttccaagctcacctctacacccaggaagctggtctcggttgcacatcttcacctcgctcctctcacaaatgcatctcactcccaaatctgctgcaaaacatcagaaccaaagaataataataataataaaaatagacatacccagtgaacgtcctcctccattgagctcctcccaccttctcttctctatccctgcaccacatctgtgcatactccttcctagaaggcaaatgtggaatattctgtctaggctatgcagagggtgggctcctaggaagcatctcctcattcacttctctcttgcacataccacacacaatggttctaacaccatggttgtcttgctttccaacatccttttcatattattttccaaatcccagtgtggtcctcccacgtgcagcccttcattgaggaagacagcattactgaccagaccacagtcatgaccatagcatctgaaatgagcaacgcccatcacccagtgcttccctcacccctccagtgtccatcactggggcagcatgccaggaatgttgaccaggatttagagtgcgggccaacctaatcacttgcactgttcggcctctgcaatggatacactttcctctctcacagagccaatcagccaccttccacctttgagttccatcactttgccggctttttctcattctctgtgctcttcctctcattcctggctctccaggtcctttttccaccatgacattcctaaagagaggtgcttgctggatgcgagctggctctcgctctgttggttgattttttttttttttttcccctgggcttgtgtggactggcagggcctgttctcagatggaaggtgtgaaagtggcataaacggcacatgagtgcatctgtttgttcccagtgacttcaggagaggcagaggtgggccaatcagccccactctcacatatggccccagcgattccagccgcaggagagtgggcctgccgcccacggacccgtgttatcgtcgggacccctagctcccacagacaggatgtgtgtgtttgtctggctgcatttctgcaggagcatctgtcactctccaatatttcctttatcattgcagcaaattatttaaacactacccactgaaccccatctgtcaccgcgccccatcactgtcagggccctgcctccccaggtctgcaaagcaactcgctggcaaaggctctgtgccaaacaacagggcaaattaaatcaaagcgcgctctggcacccagggggaaaatgcacatcagttttgacttattgcatgaagcacgcttacaagagagaaagcagcggcttttgtcactgcaaggggccatgagaaatgaattagggcctctgctgagagggcatggaggagaatctttcattctgagatgttgtcctttctcaccttgcaagaaggaaataataaaaggagaacttgtggtgggtctaagtgtctccaagctttgacactatcctgaagcacttctgggtgtagaaaggaagtgaccagttggagacaaaaggactttgagaggcttggaaatagcctgagttacatggtgccaccagagggtgagaacttgagcaggtgcaggtaagagctaacggcatctgtccatcccgggaagctggagcggggagggacagagggaaatgcaggcctcatcctcactctgccctgcagtgtggcctgggaactcctgaagaagccagcatgacaagggagcaaaaccaatgtcaccaaaccctcactacacaccacttgctgggataactcttcttcacacttgatctctttcaatccccagattctcatgagataggaattatttttgcccatcttacagatgagaaacctcaaaaagtttaaagcgattgcttgcgatcatccaatttatgtgtggcagggccaggattcaaaactacatccatctgatttcgaagcccattgcctctctttataaaagaatttctcctctgtctccctgctccccgtgagacacagctcatttgttttcctataatgagggaggggccttcgatttcctaatagattgctcacctgccgtcctagtggagctggcatttactgtggcatttactgtgtagctgcagagccttccccaccagacacatttgtactttgtgacagcaagaacacatggacagctgctggggcatttctaacacagcccttctcaggcagagatcttggctggggacagcatgactccatcctccaggagaggacaagccatgcggcatctctaattagaacccaggctggaacattcagcttaatgagctgggagttggaaacgctcagctggaaacgagttggtctggcagaaaggacataggactgagggacacattttctaaactctgtcctcatctcagttgttaatcatcttctgcttctgtctatccatcagttggttattagactgtgttattgtgcatttgcctcaagttcagagtgaacatgcgttaaatatattggacgatggcttaaatggatgatttttcctatagtcttctaggaggtcgctcgatgttgccaaatacttgggcagttcttggactgctgacatattttaaataggatgtgccaccctaagtagtgtctttgctttttgcactctctcaaaactagggaagtccaggtcaattaccatagtgttgtgctttgccatagtgattttctcacctaggcttctctctatgtatttcttgagagtttggacccatataactttagccgtcttttgaagattgttggccacaaaagagaaagcggacaactctagacctagggccacagtgtcaagggaccactgatctaaaatgagccttttgtgtggcccactatttccgttcaacacaagtaagcagggacaccacgtggaaaagagaatgatgcttatgactttgtcaaaaattcataagcacattattgtagtgattgagtattcacctgtaagatagtgacagacatccttcgtgtgtgtgacagtcaaactgaatgttcagttcaattcagtcaaaatagtccaattcagcaaacacccaatagttctgtttggaagcatcttctgtgtttaattccataagtttcctatttgtgtcctgcccctgatttaactgctagaaatattactcatctctttgtgattttaaaggaagcattgaccacctcccctgccttggtttctctgtgagtcactgctagatacggctgtgggagcaggctgatgataggtaagaatcatgtatctagaatctctctccccacaaatatatgactttctagtaaaatcatgctttcaaaatagttgccattttaaatatgaatgtaagttttgatatgattaatattggaaagagccttaaattccaatgcataaatttaaaagaaaaaaaaagaccttgaggcagggtgaggaacctctgaagaagctcaaatgaaaaaaagaaatgtagaaactgcacattgcagactgatggcactgcagggtcagctgtaaaatagttttttaggccaggcttggtggctcgtgcctgtaatcccagcacttcgggaggccaaggagggtggatcacaaggtcaggagtttgagaccagcccgaccaacatggtgaaacaccatctctactaaaaatacaaaaattagcctggcgtggtggtgcacacctgtaatcccagctactcgggaggctgaggcaggagaatcgtttgaacccgggaggcagaggtttcagtgagctgagattgcgccactgcactccagcctgggcgacagagtgagactccatctcaaaaaacaagaagttttttagttgatcaccaataaatcaactaggacagttttttgtttttgtttgtttgtttgtttgtttgtttgttgagacggagtctctctctgtcgcccaggctgtagtgcaatggtgtgagcttggctcactgcaaactccgcctcccagatcaagcaattctcctgcctcagcctgccaagaagctgggattacaggagtgcaccaccatgcctagctaatttttgtattttttgtagagacggggtttcaccatgttgatcaggctggtctcgaacacctgcaactaggacagttttgagtagaatcagttgatgaaggcatttgcctgggtggcgggagcaggagagatgtaccttaggaaaacatggaaacttttgtgaatgggaaacaagggaggaggaggactagcatttaagttattttgtgactttctaattagcaaagaactcagcctggcaccaaactcaaagctaaaacctggctgaaacaggcagtctttctttagttaccacggaagcccatggatgaatcaatgttaaatctaaaaaatcacccagcctttttttttttaaagataagagaacataagttcagagaaattaagtgaatttctcaaagtcacacagctaattagtagcaaaagtaaggtttccagacagtgtaactatttttgtaacagtctttccacagcatcatgctgtctctgaattaccatgggaatgtttatttttgcttttgcttgttctatttgtttttaagaaagttctaaactttgctttggacagaggtgcttcaaaatgtggatgatgtaattagaagtaagagaaaccaaaaaatgaattaaaaagtccacaaaaaaattattaatatggcactcagtgttaagctgaaattctggtacaagcttgtgtcctcgggttttgacttgtctgtggtttgtacaactagactataaaatatttcaaaaaatgattttattcacaatctggccaaactggcttgttctggctgaagagctacatcaaaagagggtcaccagatgggaaagccttcgtctccggggcatggcctaaaacacagctgaattatccggtgttggcagtagaacaccacggaaccttctgttcaaatgtgccctgaacccattaagtcatgagcctcaggctggtttagagagtggcttctaggcatctcgccttgttttctcctgagcaccacttgtagacctactttctttaggaaagggagacagagccgttggcagctcagatgtgaaatggggtcatggaaagagagcatgcttaggagtcgaaggatttgggcactgttgctggttctcgttttagctgcacggtcatgcacatgtctgttagcctgatgtgaaggtgacgcaggtcactcattccatttaggggtggctgggtgcactaacccagtgtcttcttccttatctgtagaaaaggtgggctttttatggagataagaactctttggccaagagagtagaggtggctccacctccctgccagaacttccaaacaagctctcaagggccttaacatgtcacctcatttctctgagcctccatttcctcatgcttaaaatcaggttgtcttgaagcccaccccacggtggatggaaagtactgcatgggaatcgctggggcatgtattggaatgccagttatgagtgcacctggggggcacagacgcacggctcacagcactgcagcttcctcctcccttttgccgtggttataatactttgaagagcagggcataccagtagggcatgcactgggaagaggaaagatcctggtcttcttctttgtttagtcagaattggttaaatgcagaactggtagttcagactgcccatgttccagacctagttagatggaggcatttctgacatgccttttaagattgaaggcagaagcacagaaggccgtgccagcacaatggaagatagaatgcttgtatctcattgtctggagaatagataggttgcaggtttcagtagaataggagctgccagtcaaacctttttaatagaatgggagcagatagatttcaataaaagaaatgagtataaatattgtgagtggaggaagggagaaagcagacagatcatgtttgactagtcacagtggggaaactttgcacgaagtttaaactgaaaacccataaagccaaggtgggtgactgggttgaatccatcgacagctgcagatccagggcttgccccatgggcatccattaaggaggctccagctggataaagagcactccaagtctgtggtctttcctcaactctaagcccatcccagccaagtgcaatgagcattcagctatctgttttactggcatcctccacccccaccctatacagaatccacggaaccctgctggcattgtgcctgtagctggtgccttattagccagggggactctgaaataattcccccaggagtctctccagggcagtagccccttccaccatagtcccagagaattatttgttagcagctgcctgatttgtccccaaattagcaaaccaaccacctaccaaggccttttggctccttctccccactgcctcaggttcccaggatttctgtgtattttacccaagggtgggacttttggccattttgtttgccactggccacggttgactaaggctgctataacaaaataccatagatggagtggcttaaacaacagacatttacttctcacagttttgcaggttggaagttccagtcaaggcactgacagattcagtgtctggtgggggctctcttcttgacttgtaagttgttgccttcttgctgcttcctcacatggcagggggagagagagaaggatcatctctttttttatctattcttacgaggactttaattccattcacgaggactccaccctcgtaagctaatcacctcccaaatgcctcatctcctaataccatcacaatgaggattaggtcttcaacataggaattttggaggaacacaaacatctactccatagcattctgaccctgtcattcctcccaaatgtatgtccttcttacatgtgcaacacacttattccatcccaacagcctcaaaagtcttaactcgctccagaatgaactctaaagtccaaagtctcatttaaatatcatcttaatcaggtgtgagacaaaatttctttgcagctgtgaacatgggaaaacaagttatgtatttccaaaatacaatagtgggacaggaatggggtaggcattcccattccaagggggagaaattgaaaagaaagaaggggcaacggttcccaggcaagactagactacaaggcaaactccatgagatcttaaggctcaagaatagtcctcttttgctacaggaatatatcttcttttgtttgatgctctgccttccagacccagtggggtggcagtcctgcgcccacagttctgcagggcagggttgcagctccatggccttgggcagctccaaccccaaggctgttcaagggggccatctggcctgttgaaactgaggtggtgctcccctgacctcatatgaaacttaggaggctgccctggtgatctctgaatcacttttttgggtcgttcttcccttgtcttgaagaattgcacacattcatagctgagtagttctaggtaaaatccaagaaatcagacaaccttccttccttctgtttccttcagtttaaaccagaagttctcctgctaggtcagctgattagcttgtggttcacatccacgctgacttccttatcaagcaatgagtctgccacgcccttagtgttctttcttttccaaacatgcttttacattttgtataattcggaccagctgagaattttccagatctttacgttctggttcctttttttttcctgaacaattccatcttcaattcatttccctttctcacatgttattattagcagtcaagaggaatcaaactgctccctcaaacacattgcttagaaagttcctaagctaaatatccagtttcatccctcacaagctctaccttccacacaaaacactggaacgtgaacaatattcagcaaagctctttgcaattttacaacaaggattacctttcctccagtttctaataacatgtcctttatttctgtctgaaatctcgtcagaacggcttttaccattcatatttctaccaatattatgtacacgattattttggcattctctaagaagatggaagctttctctccagttttcctgttttctgttggaatcttcaccagaattgcctttagtagtagacaggattcctacaacggaatggcttggtcatagggcatgtttattttaaatgtttatattgccacccagcttgccctccataaaggctatgtcaattagcaatctcaccaacaaacagaaatgtctattttcccaccctttggcccataacagatactttcaatagtttacgtttctgccagtgtgataggcaggaaattgcacctatttcaattttcatattccagttactagggaagctattgtgcatattttttcatatttcatatatttattggatatttgtatttcttctgtgaattgcttgtccatattcttcatccatttttctattgggttgtttatcattttgaaaattgatctgaaaaagcagtgtatacattatggacgttaacccttttttataaaggttataaagggtgcagatatccctcccagttattttcttgtcttttactttattttatagtatcatttgtcatacaacagttttagatttgcatgtaataaaatctgtcaatctattcctttatggctttatcatctcgtgttttgcttaggcaggcttgcatttatacatacactgtattgtatatttgcataaaccatcttaaatctcttaaaaataaaggcaagatataaagagatgaatgaattaaaataagaagagttcctcccaggcatatcacatgtgaagacagtggtatcttatatttacataccacttttacttcccaagtattttcaactttattatctcattacccaggccttgcaatgtttccgacagacataactgccaaaggcaacctcaagcagctgctcatgtatttacctctgttgccctctcatggaaagggcaagagcatggatgacagctcaagtctcccttctcttcttataaagctgtgcctgtcccaccagcaggccccaccataatgaccttatctaatcctaattgcttcccaaaagctccacctccaatcaacatatgaatttggggatgaaggttccaccacatggaatttgaaggacacattcaaaccatagtagtagctaaggtgagaggattagctgcatgtgtaccagctatggagacttggagcaaataattttcacttttctcgtagtattgtcttttaaatactgtggcattagaatctactcttaatttgtatggtggttctgtgaatgaaatgggattacccatctcaagcattttaaacataaaaatgctcaaagagccagatatatttttattaaaaaataaaaactggaacagcttctggcatggttgaaaggagatggttttgtacgcaaacgtaggctttacttcttgttctgccattttccagccatgagattttgggcaaattacttaaattttctaatacgctaaagttcatttctggtccagaggagacatcaaatcttttctgaattcgttcaccagaaacaacccaaactctcccttgccttctgaacctcaaactggtagcaatgttgtaccagtttggattcttcccttgcataaaaaccagcactgatgttaatgtaatctaaggggaatacattgccgggaatctaggggcttatggaatttatgaaaagctgggtcaaatgcaggaaacatgacagtgaaggtggatgggaagtagggagcactggcatgatcattgtgatggtgatgatgacaccaacccgtggcatgcagtcgttgtgcatcaggcactatttcaagcattttttttatgtattaactcattcatttctaataacaacctgaatgaagtatgtgctattcttctccacgttttatagatgagaaaactgaagcacaggcagagaggagttaagtagaaagcccagggaaacacatccgcaggtggcagagatgggatacactgttgggatttcccacctgtccaggttcagggttcctagaagacagacacttaagccaaaatcatgtctgctacttccttaacacagggtgctgttctaggaggaagaatgaggaaaaacatgaagcaggacagagcaggagggagagcaagtacaggggtgacctttctggagctggttacaggttcacagtaatacacctgcctgcctggtctatgggatggctcaggagagtcacaagaaacaactgcacttcaggacagtcttttgtgggaaggagggacagggattgatcactcctggttgaagcctacagcaaggggcattaactctccgcaagtccagctgtgtcgcccagtctcccaggcagctagagcctccctgaggtgagtccagctaaggcacaggcatagccatctctcttgttgccagtgtggagtggggagccctggatctgtcctagtagtggcatctgaggccgcctcattacaacctcagagcagtgtgagccctgctaagattgctgcagggagggatgaagcagaaactgagacccaacctctatctaaatatgattttacatgaatataactctaggtagagccaaatagaagccacatgtaatgaggagaggcttttaatctcttcctctgagacagtagcatgatctaagttttaaagacagagaactcaagagctagaaggattatgtgatttgaatgaggttttattgctgtttagacatggtggtgagaaagagaatccaagtgccctagatctttctgaagttttgatttttgttgatagcatagatttaatatgctcataacagttttgggtctggtggaaggagtttcagagaggaaaagctgtgaatgtgtgtgtagatggaatttgcctaattgttttagaacaagcacatattgttgaataacttagttgacatttgaaccagagaaggccattaatagattttgaatgtaaatgttttatttgaaaccaaatgatctttatagagactacaagcattagaggttgttagtcctcatcagggaaagttggcgtatcaaatcatgacggaaataaccaacactgcagttcaaatagcagaggaaagacgggaggggccacccaccatttatcaacattttcatgtgctagcaccttgtaataaggacaagcagtatcttatacatgtctgctgtactccctttccctggagtagctagatcaaaggatttttcctctgaaaagctcatttagtctcatagcaaagattcagtagatgaaagactagaagtgcagtccaggagcataaaatcaattaacttaaaaaatacagtgtaatatattatagctggttacttagagatgctgctactaaaacattgcaaacatcatcggaagacatgctatcatttaaatatatacattcctcactctttagttacatgactctctttaaatctactgaaatttacgtatctccctccctcacactttccttacccatagttgatgggtttcaaatccacacgcaagcccttatcttgggttcttggatgatttttttttttttttaattttcattcagatacctttaaaaaaaaaaactcatgggagctgggtgcatggctcacacctgtaatcccaacactttgggaggccgaggtgggtggatcacctgaggtcaggagttcaagaccagcctggctgaaatggcaaaaccctgtctctactaaaaatagaaaaattatccgggcatggtggcaggtgcctctaatcccagctgaggtgggagaattgcttgaactggggaggcagaggttgatgcaggagaatcacttgaactggggaggcagatgttgcagcgagccgagatcgctccattgcactccagtctgggtgacagagcaagactccatctcaaaaaaaaaaaaacaaaaaaaacccagaaacctcattgaaaaatcatatcatatccatgaaactttcttaatggagtgcatatgggtgttttttttgcattcaggaaataaactaatagaaagaaatgatagtcaaacacaaccacaagaacactgcctttcatgttcctgttagggacaggctcttaggagtcaagaactagattgtagaatccaagcccctgggttcatacctataatattaccaaataatgactttaacaaatttttactgaatgcttaaatgtgtaaagattttgccactatggagcaagagttatgtaaaactttctccttacaacatagtagttagaccttagttccaataagacttatattaaaggtagacttctagaatcccatatttttcttaataactacaatttttaagtcatgatgcctcagcctcacatctgtgttgcactctgctagctacgtatacactattattttatttcaatctctatcacaaccatgcaaagtagacatcaccctcctttttcaaatgaggaattcagactccatgaatagttcagtcaaaatttcacaacacacataaaatcatcaaacaccttctgcatcttgttttatttttgttttagaagtttggcatacaatcgtgtttggtgagggaagaagctgcccatatgtttaggtttggctaatggttgtgattactaattcaagtgtgtgtgtctgtgtgtggtgtggatgtgtggagtgtggtctcctctgtgtgtgtgtgtgtgtgtatgtgtgtgtttgtggtgtggggtcctctctctctctctgtgtgtgtgtgtgtgtgtgtgtgtgtgttttagatagtgcgttaaatttaggataattttgcattatttttaaagataggtctgagctaatgctaatattttagttccatagaaggaaaaagtccagtttgctatgagaatagtaacattgtctacgctctctctagcagaaaggaaaggatggtgagtctcagtgggcagcctggggaaggtcagagaatgccagcttgttcctgagtggcctcagtgatgacccagacatggtcagtcatgattcctcagacttgggcataatcgaaggatcatctggatctctgcttctcctaatgcctttatcccctgcattccaaagcaagaggggagaaaagcaaaattgaatctgaaggcagactccatgtgaccactttaattaaatgtaagagtggctgctgtgtgaggcaaaaggaaaaaactcaggagaaagggcatgatattgttttgaagcagggaagccgaggacatacaatagaacaagaaaataaagtatggaagttgttcaactaccgtctgcttcgtatgcattctattgcaggtgtagagatctggagagaaggacagagagggcaatactagtgattttgtttttaaataagttaccaaaggtaattaagtcttccttttgtgcttcaatggaaacagaatgactcaagctccaaccagcaggatgtcatgcttcctgggctagactgcaccgtctatcccactaaaatgggcaaatatttcactaccgtttggtacttctctatgttgccttctgttaataaaatactcatcaataacaatcccatctaatatggcagattattatataggtcttataatgtagttcaatttatgtaaacaagcctgaagaatagatattttacaggccaggatttatatacaaattgcatcacccataaatgctacagccaggattggaatcaaggtttctgacttcaattcagtgttctcttcatgacatgatactgactgagagtgaccactgcactgtggctgttgagggtgagaaagcacagtcattgttgactgggggctcctggcaagccaacaatgtaaaaatgttccagaaaaatcccatcactcaggagtcaactctgaacatacacctgagagatgtgtcatttacttcatcaagtgatttgtgtgtggttttaaaactcaactttactgggctataatttacatacaaagactttcaaacattttaaggttgatgacttttgacaaattgtatacagtcaggtaaccaacttaatcaaaatataaaacctctccatcgagcgagaacattccttcatgtctctttacatttctttagtcattctctctcctcagcgtcctactccaggcaaccactcgtgtggcctctataactacggatagcgttttattcatatgagatcatacgtatatattctttagagtaaggcttcttcacttgacatagtctctgtgagatttgtctttatttttgcatatagtttacattttattaagagaccatatattttattttttattattattttcttttttgagacagaatctctctcgtttgcccaggttggagtgcaatagcacgatatcggctcactgcaacctttgcctcctgggttcaagcgattctctcacctcagcttccggagtagctgggattacaggtgccaccaatgcccagctaatttttgtatttttagtagagacggggtttcaccatgttagccaggctggtcttgaactcctgacctcaagtgatcagccgatcttggcctcccaaattgctaagattacaagcatgagtcactgtgcctggtcagagaaccatatttttaaaaatcagtttatttgtccaaagaaatttaggttatttttagtttaaggttattatgactaaaactgttatgaacatttttgtatatgtctttataaatttatttttatttttttttttacttttttggggggtaatagcaaggattagaatggctgtgtcacaagtgtatgttaagatataaaaaacaattttgaaaaatggttgagccgctttacaccaaaaatatataagccttccacttgttccacatccttgctctttggaattgtgctttgtgtatgtgtgtattacaattaactaattaaaaggtaatacatgaaaatgaataaatgcagttgttagcattgttgagatatgattaacatagcttacaccttattcatttacaaatgtataattttgtgagttttggtatatttaaaagttatacaactacccgtttattgttgtgcaatacaatcaatttagaaaaatgttatcatccccaacagaaacccataccttttgtaagtgaccttcatctcaccccccagcacattaccttccctaaggccaggcaaccactagtgtactttctttttctataaaattgcctgttcggtttatatcttttgtcttttgccactgctttgttgacttagcataatgttcttaaggtccatccatattgtagagtctatcagtagttcatttgtttttatgactaatattacactgtatggatccacattttgtttatccattcatcagtggatggacatttgggttgcttccaccttgggactattgtgagtaatactgttatgaacattcatgtacaagtttttgtgtagacatatattttcttttctcttggttttatacctaggagtggaatagctgggtggtaggttaactacatttcaccctttgaggaactgccagactattttgcaaagttgctgtaccattgtacattctcactttagcatatgactcttccaatatttcaacatctacaccaacacttgttattatccatcttttttattatagccatcctagtggggtggaagtgtgatctcattgtggttatgatttgcattttcctgagggctaatgataggaactgtttttgatgttcttattggccattcatacatctttggagacatgtctgtttagaactttagcccatttttaattgggttgtcttttttttttttttagtgagctgtaagagttctttatattttctatatatgaattcctaatcagatatatgattggcagatattgtctctcattctttgtcatttcactttcttggtattctttgaagcactaaacttaaatttttttgatgttcaacttatacattttttgttgcttgtgcttttgattgtcatataagaaacaaatcatttccataggaaaccattccaaggtcatcaagatttatccctgtgttttcttctaagagttatagaacttatattatgtatcttgagttaaattttgtatttagtatgtagtaagatacaactttattcttttgcatgtggatatctagttttccccagcatcatttgttgaaaagactactccttcccctaggaactgttttgatacccttgccaaaaatcatttgatcataactgtggggtgggagtgttgctcctaaactgtcaattttatcccattgttctatgtatttctccttatgccagtatcacagtctggattactgtagctttatagtgatatttggaatctggaaatgtgggttctttaaatttgttctttgttttcaatattgttttagttcttctaggacccttgaattgccatacaaattttatcatcagcttgtcaatctcagcaaagaagccagctgttattttgatagcaattatattaaatctgtaaaataatttagggaatattgccattttaacattaagccttccaattcatgaacatgggaagttttcccaattatttagatcttctttaatgacattcaataatattttgtagtttgcatagtaaagtttgtcactattttattaaatttattgctaagcattttattctttttgatactacggtaaaaagagttgcttttgtaaattcatttttagattgtttattgaaaatatatagaaatacaattgatttttgcatattgctcttgtatcctgcaatatttctgagctcatttattagtttgaattttttttagtggatttcttagttttcactgtatataagatcctgtcatttgtgaatagatttacttccttcctccagtttgctttttattacattttcttgcctagtagtcctggatacaacatagagtacaatgttgactagaactggttgagaggagatagccttctcttgtttctgatcttaagggaaagcattttgatttttaccactaagtataatgttagctttatgatttttgttttgtttttgtttttgttttttgtagatccacttctacaaaaatgttctggttcggattgaggaagtttcctgctattcctagtttgttgtgtgttttttttatcatgaaggagtgttggattttatcaaatgcttttactgcatctcttgagattattgtgtggttttgtaccttattctgttgaaatggtatattatattaatcaatttctggatgttgaaccaattttgcattcctggtagaaattccattgattcatagtgcgtaatcatttttatttgttgccaggttttgttgactagtgttttttttttttttttttttttttttcctgaggaattccacatatgtattcataaaagatattggtctgtagttttccttccttgtgatatctgcctggtcttggaattagggtaatactagctgcatacaatgggttgagacgtatcctctactatttttaaaaataatttctagataataggtatcagttcttcaaatattttgtgactttaccagtgatccatctatgcctaagctttctttgtgagtaacttttgattactaatttaatatgtttgttaaagtcctattttgatttttaaaatatctccttggctgggcgtggtggctcatgcctgtaattctagcactttgggaggccgaggtgggcatatcacatgaggtcaggagttcaaaaccagcctggccaacatggtgaaaccccgtctctactaaaaatacaaaaaattagccagcgtggtggtgcatgcctgtaatcccagctacttgggaggctgaggtaggagaattgcttgcacctgagagacagaggttgcagtaagctgagatcatgccattgcactccagcctgggcaataagagtgaaactccatctcaaaacaaaacaaaacaacaacaacaaaaaacacaacttcttgagcctatttcagtagtttgtatctatatgaatttgtccatttaatctaagtgatctagcttattagtatacaattattcataacattgctttatgatcctttttgttctgtaagtttggcagtaatgtttcctccttaattttttattttagtaattttacttctatttcttttgtttttttctttgttcagccttagtaaagccttgtcaaataaccaacaattgattttcttgactttttaaatttattttttatttcattaatgtcttcttttaaaataattttcttctttctgcctggtttaggcttagtttatgcctttttgtccagtgtattaaactgaaagtttaggttattgatttaaggtcactctcttttttttaatattatagacatttatggatataaatgttcctctaagtattgctttgctgcatcccaaaagtttttggtttttgttattttttaaagtttcaatatattatgtcttcatttccatttatctcaaagtataatttgaaataaattccagatgacctgctcttatatgtaataaattccaagtttcctttggctcattggttatttagaagtgtattgttaggttcatgtatttctgaatttctcgattatttttctgttacagatttctaatttcaatccattgtggtcagagaacatactttctatgatttcagtctttcaaaatttattggaacttgctttatagcccagtatatggtttatcttggaggataaaccatagcatttaatgtgttccaagtgcacttgagaaggatgtttattgtgctattcaatggagtatactatatgccagtctctttaaattttagccagtccagtgagtgttcagcgctgtttcattgtagggtgaattcatgtttttctgcttagtaatgatgttgaatatcttttcatttttacatgggccacttggatagttctttgcccattttcaaataaaatgcattatgttatttttgagttatatgagtatcatatatttgggatacaagcaccttgccagatatatttggattgcaaacatttcatttcattttttgggttacattttcattttcttaagttatcttttgataaacttatatatagttttatggcaagtctaaagatctttggctaccctaaggtcatgaagatgttctacgttctcttcaagatgttttatagttttagcctttatgtttagatgtacaatccatttcagttattttttatatgatgtaaggaaggcattgagatattttttcatttttctgattcagatatccagtcatcctagaacgtgtattgaagggactatctttttaacactgaattatattggtgacttttcaaaaatcaattgactttatatgtatgggtatttgggaactaactattctcttccatcaatgtatatatcaatccttgtgccaatgccacagtgtgttgattattgtaactttctagtaaggacttaatgagatagtatgaattctccaatttgatttctcttttttttcattttttgaaatgaattttttttcattttttgctcattctgcatacttcgcttttccacatatattgcagagcaagttagtcaattctttttaaagtactgtgttttttactggtgtttgtttctttaattttttattgatttaactgatacattacaattgtgcatatttatgaagtacaacttgatgttttatatatatatgtatatatatatgtatatatatacgtatatatacgtatatatatatgtgtatatatatatatatgttatataatgatcccatcagggtagttagtatagccatcgcctcatgtatttttcatttctttgtggtgagaacattcaaaagcctctcttctagctgttttgtaatatataatattttactgttaaccatagtcaccctgcaatgcactaaaacaccagaatgtatttttcttgtctaattgtgactttatacctattgatcaacttctccccatcctcgcctcctgcttctccttgctagtctctgataacgactgttctactgtttctgtgatattgacttttaattttttttttagattctacatatatgtgagatcatgcagtatttgtcattctgtgtctggcttatttcacttaacctgctgccctccaggttcattcatgtaatgcagtgaagtgacagattttatttttgtgtggctgaatagtattccattgtgtatagataaccacattttctttattcatccatcgttagtcacttaggttggtttcatatcttgtctattgtgaataatgctgtaataaatatgagagtgcagatatctctttgacatgctgatttcatttcctttagatatagtcaataacgggattcttggatcataaaagttagtatagcagacctgagactactgtcatttatagaggattgcttgcaagcttggcttttggggggtgtctcagactcaactggtaaacagtttcctaaatttataaaaaatactccttaactgaggagagtggcttactgtgcatagaatgatcacacaaaaattgtggttcatgctgacacctgctttccttctagaaatctggaattttggtgcaccttaggcaggaggtagctatgtgaccacttccaattaaaacattgtctgctaagtctcaaatgggattccttagacagcaacatcatccacatggtgctgcatttttgttgtgggggaagagtgtgctctgtgtgacccttcttgggagggaaagagcatagagaagcctgtatatgggttcctgcagcctctacctgtgcctttatcccttacgattcagcagtaagtcttactctaccattgttaaaagtcttggccaagagtacaactttatgctgagtcctatgactatccgaggtgtaggggtggtcttagggactcctgacagatagttggcttattctattccactatgttgttgctagtatatagaaatacaactgatttttttatgttgattttgcattttgtgacttcacaacatccacttctatttctagcagtgctttgtaaattccttatgtttctacatgggcaatcatgtgattggtgaataaagataattttacttcttcctttctaatctgtaatcccttttattactgtttcctgtcttattgccctagtaagacttctgttggctgaaagtggcaagagtgtacatttttgccttgtttcttatataaggtggaaaacattcatcttctcattattaatttataattgattttatcgacttacttacaagttaatgactttgccttgactggatgtttttctaagaaaaggttgcttcaaaacaggagataatagcaaggcatatattgtgctggtaccaggtgaccaaggattgtaggagaaggctctattgatgaggataaaaagagatgaaaggtggcattgcaatgtctaaaaacctacttgatacctttgcagattttcctctaatttgcttttcttcttttcccttatatatctctcagttcctagcccaatgtctcacagagttggttctcaaaaaataagaatttgggcgtacttgaattgaaaccaatcagtataagggattatttttaattttgttggatgccataattatatttgataacgtaatatcaaaagcattacttttagaggtatttttgaaatatgtctagggaaaatagtatattatttgggatttgttttcaaatattccaacaaataacaatagtaaccaaaatgagattgttacaatattggtaattgtaaaagcttggtgctatttctatcatgctaaaatatatatatatatttaaaaatccatcctctgtgctactgtttaatgagaaatgggtaaattctggtttgaggactcttactttctgagttccaagaaattgaaagcatatttgccaattacttttatataacagtttattgagaactcgaaaaataattggtattaacgaatcatcaaacagtctttgaaagtctgctttgggccacagtcaccgcttaatcactgtggtattcacatcaacatcggccttctggttgccaagtccaatggacacttcttccttaccttagttcaacactctgcatcctttacagcctacccaatacttattgaggatttctgttcctttgcttggcctctgttgtacttagctagtgctgtgtaagaaaccacccccaagctttgctgtgtaaaccaatcattgtattatgctctcagatactttgggtcagggatttgtgttggacacagagggatcaacctatctctgttccatgatgtctgtgggcctcagttggaaagacctgaaggctagggatgagttggcagcaggggggctggagtcatctagaggcatcttcacccatctctgctaatccgtcagccagaacacctacacgtggcctctccaagtagtctttgtgcatagccttgcttgggcttcctcctagcaaggtggctgggtttctagaacacaggcagaaactacattgcagccccacccagacacaagagacacaagtggaatgcaagggtgcagggtcatattctccacctctcagtgggaggactgtcaaagtcagtgtggtatggagacaccatccagagatctttggaaaacacattctgtcttagcttcgtaatgctgctttacagttctcctcctttggaatgtctttcttaaccttcatttgggcttctctctctctctctctctctctctctctctctctctctctttactgcttaaatgtcagtaatctccagggtggctctgatacagatcctttctttgttcactctacgctcctctccttgtatttcattcaaccccgcagctataacttacaccaatatgtagctgcaataaacatgtaacaagcagatctgtacagctcagtcttcactcctgagagccaaatccaaatatccacaagacgtccccttttgaatatcttacagtcacattaaacttagatcatccaaatggaatgcaacatggtgtttcttctgtctgcccctgatagtcttcctgttctgcttatcacagagaataccacagctatctgctggccccaaacagagacttgtaagttattttagatgccttctttttattccagctatcttttcaattaatatccaagtcccatcaattaattcttctaaatttccttttaatatattacattctgtccatttccacagccactgcctacctgaggcacatattatctcttactggaatcattgtgctatttctctcatgaatccatttgtctttagacttggcctctgcttcctcctccattctgctgctagagggcactgtttatcacagagatctgttcatgtgactctcgctccaatcttgcagatgatcatccaagattctcaggagtatcctacagtccttttgcttgtcatgtttagatgccagcccacatgttcgcacttaatgctcaccagaacttccactactgcacgttaaatcccaggctcaaacaattatgtataaatacttaaaaccatatgtcttcatgcctctgattttttgcacaggctattccacctgcctggaatcctttccgccattgatcttccaggcctttgtttatatttagcctttaaaaatctcagcttaagtgctacctcttctattaatatttccctaataactcaccttctccacccacacacatgcccatacccaccaaaattaacacacacaagatctctgtagatttgtggacttaacactctgcatttcctttgcataccttccatataaagattcacatcgtgttataataattgtatcacagaactctctgtgggctgtccatctcttaatggtgaggactgcctcagtaatcatccatttattaattcattcaacaaataatgaccaataactcctactatatgccggttactgttgttgaaacagaccgccatggtaaacaggacttcattgatagtctgtctccagctcatggtacatgttcagaacatcagcgttgaatttttaagtcatctctggactatcattggtgctcagtaattgttgttaaacagttgatgagagaaaattccccttgatggatctcaaccgaggtcatcagagaaatccttctgtacatatagggcagggattgtgatttactagtttgcctaatgccagaaaataaatttgaggtttgctagcaaagttccttggatttatcttgaaggctgtgttgacatcagtatcccccacccgaaatagtaatgtaacatggtgaaagtacaggacactccagcagaaacatgcagtttgctcgcctagggtgcaccagctctttagttttcgggtgaacttagtctcagcaccctccgagtctactggagacatctcctggcctcaccacactgtcctgatactctcttcttttttttttttttttttttttttttttgagatggagtcacgccctggcacccaggctggagtgcagtggcatgttcttggctcactgcaacctccacctcccaggttcaagcgattctcctgtctcagcctcccaagtaactgggattacaggtgcatgccaccacacccagctgatttttgtatttttagtagagacagggtttcaccatgttggccaggctggtctggaatggctgacctcaggtgatctgcccacctcggcctcccaaagcgctgggattacaggcctgagtcaccacccctggcctctgatagtcttcttattgtgaattgtagggatagctttcatttgtttgtggttctgtaaaccccaccccagatttcaaagccacctatagctagctgttcctcagattcaacagtcattgcccacagggcagtcattggctaagaaacctctggaggaaaatcacacttgaggcaaataacattctctcactattagcagctttgatcttttttaaaacctcattttctttttccagcccccattgcattgtagacatttttataatgagcataaatgttcatttaattttatttggcatatgctgctttgaaagtgccacatcaacatggagcatcactccttcagtaactaaattcttctaacagctttaaaggaatgaccttgggtgtgaccagtgggtcttcagagcatggctgcgttttgattagctaaattttctgttagcccagtgagtccacacaccaattagtggagcataatcacaagcctgaaggtttcaggagttttctcacagggaagtaacattgatacttttcttaatatattattatttttaagtaaatatctgacagtgtctaggtaatcaattctgtgcccacaaaagctcagtgtgcctccgaaagagttcaatatatacaagtatatgcatatacgtatatgtttttcacaattcagatgcaaatacacagaaacatttgttcatcttcaaatcattttaatagatgattgggttccttgtccacccactgcccaatgactgtgggagaaccttctttcatttacagaaccccagtctgtaagaatagatatctaaaaatacagaagtctgatgcccagaaattgtccttgaagcttgattccaaagcacaatatgtgcagcccaaagcatgaccagacagtaagctttcacatcatacatgggtcaagcacagacatattcttcttttagatttggaataagggttaattgcatcatctaggaagcgttcaggaatatagccttgtgaattctcacagttatgagtactatcaaaaattgacttcacacatgataaaaagaacaagaaatcttggaatgctttcaatctcaaaaaaagtattgtgatattaataacatagataaaatttatttttattaatttctgcttccaaactttcaacctgtgagctttaagcccacatcttatcatattgttatgtttcattgccaaaagcaactacgtattgatatttcagaaatgctgccaggcctttatgtaactagttgctattttacctcaaaaaataaataatgcttcctgtttttacttttacttatctggaataagtagctattgacatctgctgaagtcagtataaagatttatttacctgagtgtagatattgaccaatagggagcctggctcaatgtttacattgaaggacaataaattgccgtattgactgggctgagacatcaatatttgcattgttgtaaacatttttaaaaatcttcatgaaatattcctcagaaattctcttgtcaccagagcagctgagctagagctctttagggaatagcttgtgtctggaagccagtgggtaacttgaaatagctataaattgttctggtttccaagtttacacaaagacacattttttattgtgatgtataatgctgatcattaggagctttcagatgacagtcccagccccctcctcaaatagcagatttttgtctacaacaactctgaacagaaatacgctccccgagtagcttgtgtcttgaaaagctcatgttttccaaaaaatatctcattgcccaaacagtgaaacatcattaattccaaccagattaattaattaaaaatgtgggatgtttcaactcagttggaataagtttttcctttgtgtcaagagtagaaagaggaagatgatttagaaaacattaggacaggtaaagtgataaattgaatatttagcctgtttaagagagaaacataatctacacaaaatcttcttacaatctatgaatgcctattaataggcattaacttaacttcttaactccaagtgatatgtgtgtttatataatatatgccattttaattaagctttgtaatagatacaggttaaacaactttatcaacatgtgttcatataatttaatgtacttggaagaaatgaaacgggaaattcctttattcctttttttttttttttttttttttttatttgagacagagtctcgctctgtctccatgccaaagtgcagtggcatgattttggctcactgcaaccttcgcctcctgggttcaagcgattctcctgcctcagcctcctgagtagctgggactacaggcacgtgccaccatgcccacctaatttttgtatttttagtagagatagggtttcaccatgttggccaggatggtctcaatctcttaacatcgtgatccacctgcctcagcctcctaaagtgctgggattataggcatgagccaccgctccgggtcaacaggggcaatttctgtcatatggtgtaaaagctaaacatctggcaaattcttaattttttccaagttggtaaaatcataacctactttagccagcccaatagttctaagggagtggctcaagataattagcaccacctcttggagaagcacagattcattgttctagtgcagggtttggtgcctcatcgtctttgtcaagtaagacaattaggacagcgatcagagatcaaggagctcgggatgatgtgcaaaatgtgatgcctatttatgcttgaataacaatttggatgaaaaaattggcatcttaaaaaaatatttgcatcatggttatattcctaaatgatgaatgaaagaaaagaagcatccagttctctctgcagttgcttccacctctaggcggtacttcatagcaccctgttctaagttaggctcagggactgagaatgcttttagcgaagagggataggaggggaggctaagatgggcaagtctgaaatgtgccctcctgttcaatggggggctttagagggaaagtggaaatgtcctaccagtaaccgtgtctgcagaggagacactaagctcttgcccaggccccatgggagtgcctgtgctgtcatcaccccaggggctctatctcagtgattccctccatcccgcccttttcctggcctcctctcctcctcttgggcttctccctctcccttccttcctccctctgaggcaatgcccagtgcttgtagaaagccccaccacttccaaaggactgtcccagcccctggggcctcagccccaggatccctagaggatgattttgtggggattaaaatgaaatgaggtatgggaaagagctggcgcacagcaaaccctccaaggtgagccccctccctattctgggctttcccctggacacccactctactggttgctagcgctgaggtaacaaagtaccacagcctggagggcttcaacaacagcaatgcattgtcttacaaatttggaggccagaagtctgagctaaaacagtcggcctggttgatttctgggagggcctctctccttggcatgtagaaggtcgccttctccctgtgttttcacatgtcttccctctgcatctctgtgtcctgatctcttctcctaaggacaccagtcccattagattgggtctcccccagtgacctcagtttaactgcatgacctacttagggaccctgcttccaaatgccctcacactgcgatactgggaccctgcttccaaatgcccccacactgtgatactgggaccctgcttccaaatgccctcacactgtgatactgggaccctgcttccaaatgccctcacactgtgatactggcggttgggacttcaacttacggatttggggtgggagcataaatcagcccataacaactggtcagtccctctcctctgcctcctccaactgtcacattgtaaaccccacctgactcttccccgacagtggccttggggagaaggcggggccggccagggtttctactcctgcctcatggagacccgcctcagatgcccagcactgcgactgctgcacagccacgaggctgagccgctgcggatgcatgcgtgacttaggaatgtgtgctggtgtgtttgccacagcaacaggatgaggaaagcacagctccaagagaggtgggagctcatccacctggggaagcatgagcaggagcaggaagggtcactctgggactgtgctcatgggaccctgagatgcagcagaaagagcagtgtgaggagcaaagtgacgctgcctgcaggtgctgtccactcagaccttcccagcctaggcttccctgctacccacgtcttcccacctggactccccctctctcaaggggcatcctcagtagtgctctctcagcccatctgcccctcagaggcctggacccctgccttgccctctgtggcttcacattaacattgactgggagccatcctacctggttctcatgcccaccagccttcctctccaccctgtggtcacaggactatgggcagcctctgctctgagctccctttgtacctctctcttctcacctttttgttgttgttaattgtcatgcacatcttgaagaaggaggaatgaaatgctcccagctctgaccaactctgtttttctaagtgtcctccttcgtggacctgactgagatggcactgctactctcactgtcacagccacccctcgacagcctgaggcacactccctgctgttcaggagcacccagattggggcatcggtgcacctggacttgctatgtctcgggcaccacccattacacttatcactttttctccatgagttatattcacagcggttccccaggcatcaaattggcaatatgagtttagctcttaggaccaaaggacacacaagagatcatttattctttgcatcactccccttttctcaggtaggacatcaatcttccccgactctgctctggccatatttactgccagtcgctgtcccttagactgtctgcctctcctagccttgacagatgagtctcactccaccaggatctttacaattcaaggcacagtccagcctcttgtagatgggaatcttgctaatgtagccactctagcttatcctggctgcatcatgagaaaaatggagttcagctcaggactggcttcctcggtttgcagagtcagtgggcacctgcaaactaagagcttccatctgcaaggaagacctatcaccccaagcacttggcttggctgctggctgacatttgatcatcagtacctttagtttgagtctctggtttctgtgaaataataacttctaatatccacacagtggagtacaatttacagaatgcatccatatatttaaaatatttaaactgatctataaacttcacagtcgatattatatccccctcattttatcaggaacataaaataagagactcattcaagctaaaacataaacgagtctggcctatggcagtgcaggctatttctgtctgttacagcaggctgccactctgcacttcatctcaggagaacagtttaaaaatagtagttcttttcaaatgggattgtgtttctggccctttcttggaagaggacctgaatgaaggattgaaagattcaaaggaaggagatttaggagtaacacagaagcaccatttaggtaaatgctagagaagaacacgatattacacatactttgcctgtccgccccccccacccaaacacacacagcctcaatgcgcaactttggcccacttatttttgcctcaccactctgttgttgctactagaatttttgatacttctgatactcaatggttttcaactgggcaccatctctgggggatattcgaatatgcatgagcccaccagaatgaccgcatggctctactggccccctgtggggaggggccaggaatgctgaacatcactgtggctagagcagggcacagtgttgaatccacctgaccaccatgacaatggtgtatccaatgagaaaacaaactagggagatgcatcagacttaggaagctccgccatctgttcgcaggatccctgagaaccctggctattctacctttcctgcacttctgcctattgatccttctttgaagatgcttttcttctttggtgcctatgtccttctcactcttgaaatgactcaactacagaaaatcctttccctggtacatgaacaagggctttctcctttaaattcctccttagtgtgtatttattcttcaaaatattttctagaccatttgagacccctcaggctgtcgatggcagagaatgtgctgtctgatgctcatccatcatcctcccttgtcagatctgtctaaccagtccttaggccctttaggcaaggccagtttcagtcctggtgggtgtaaagctgagtaattttctcaggcacacataatggtgaaataatgatgatcatagtcagaattatgattttggtaagtggagtatgctgtgttttccaaacgcttatttttcattatgtatagaatgaataatggaagacacattgagctcaggacccggatgttctgtctgcgtacgtttccttctaataacttgagagaagcattcttttatccagctcatgtcatgcatgtcaggctgggtgtgcatgtgactgagcagaggaccctagagctgcatatgtgtcatgccacctgaggtttaagttatataaattcttgggggaaaagatctggtttatatttaaaaaatgcttaaaaggctggagaaaaggatcagagagactgaacagcctctaaaaaatacaatttcagggagtcaagtacaaatgaatcagggacttttgactctgcatgtttcccaatataaaacatctgaaaaatggatttaaactagaaataaatgaccagatctaaggattctgatagagaaagaaaaaatgtgctaacatgcatgtgtgagcatgcatgtgaatgtgtctctaataagcttacattgcatgagcttacaattttgggtcggtatgcatgtccaaatgcaggatatgggtacacatgaaaagcaggaaaaacatagtgtgctgaggatttgtttggtgtatatgtgtctattttgaagaatatggaagaataattgaggctactcatttaataaacatttatgtggttcaagggtatgatatacattgtccctagagacaaaaattagtaaaatttcagtttctttatatgctttgtgaaaaataatctccttttacaaaactctttagtattgtgtgcagcgcacagagcctagtgtcagtgtttctctggggattgaagcagacagttctgccaaccagcatggatgggggaatagcctgggcaggatgcaagccacatcgtgcagaatatgattcttagtggaatagaaagccaagtgccatggaagccaagacacgtgcaggcttaccaagatgccccaagccattggagagaatatggagtttctcagtgcacagaagattcagaagatttacttaaacttaaagggcaagtagaccttaagaagctgtaaaacttgaggacatccaagattctgacatatgaaatataatttctttggcacctatggtataccatacactcttagctactaaacttagctactttttgaatgcatgtttctgtgcctgtatgttttaatgcatacatcaattcatgtatagaacaccacttgaactgaacggaatacacaatagtttcaccccaaaatatttcttttgttgccttcccatcttttaacctctattgtttagattggatactttttttctttctttctttttctttttttttgggacagagtttcgcttttgttgcccaggctggagtgcaatggcacgatcttggcccactgcaacctccagctcccgggttcaagcgattgtcctgcctcagcctcctgagtagctgggattacaggcgcccaccaccacgcccagctaattttttgtatttttagtagagacggggtttcaccatgttggccaggctggtcttgaactcctggcctcaggtgatccacccgcctcagcctcccaaagtgctgggattataggagtgagccaccatgcctggtgcgataatttctatttatctttaagtttactgactttttactctatcatctctattttgctattaaactgatccaattagtacctaaaactcagtcctagtttttcttacttgcttcttgtgtatggcttctagttctgtcttgagaatgtccaccatcatatttgttttaaaagtgttcacctttactttgcagggcatagttttagcagctgctttaagatctggcaatttgcaacaattctcagggatggtgtttgttaattgtcttttcccttgggaattatttagcttccccttgctctttgtaggatgagtaatttttgattatatagtgcacatttttatcttactagactctagattctgttaagatcctttgagaatatacaggcagagttcaccaactaagactctgggtggtggtttacacaagagttcagttctcaaagcctttggtgtactgtcctgggtgagttccacacaagttcagagtgaacctgggactttatacattgctatacctgattcctttcttgagctccttctctccgtgatttccccctgctctccagctcccatgagccccctttctttgccatctgcctagaaagcaggagtattagcaccatactccatcccctcaccccctgccataaccttaatgttacaaatttcttgtgactgagtccaactccagggaaaagtggtgagaagaaagagaagaaaaaatgtaataggtattcctctacacttttcagaccacagaggctcctgtactcagttccgctggtcatgaagtatttttttagagttttagatgtctttgtggccactgctgctactatcaccactgctgcaagactgcagcgtcagcactgaggtttacctcagggcagggtcgagggaaggaaagaaagtggacttccccggactctccgtcttacaagccttatctttccacatcctcagaccaaaaagagtttatccaagagtttttgtttgttttgttctgttttgttgttgttgtttctgttggcatttgctatacagttttaggattctggctgttctaagtttaagccaggaaaggaaggaggaaaataaacaacaggacatttgccgctatattgttctttcttcaagttttcatttccctccacaagcttcctgctattgtttaaccttcagagctctcatatatttcatttatgtatttttgtcagttataatgaatgggagagaaaggataagatgtagttaccccataataacttggactgcaagtcttatagagaattaaaaataatagcagtaagactgactaaaagatagtctgatttttttttttttattatcactgtacacatgtaattttaaacaccatcagtgagcagacatctcccactgccctgcccttggtaaatcactgatatggggaaattgggagccgggagtaataggaaatagggctaaagagtcagctatgtttgtcatgggttattaaagaacttaataaggacggtgtccttcattctggagttctaaatatgcattggatactgagcgtattgttttaatagaccctgtgcataaaagcatagatgaagaattaacattgacctagtaaattataaatttattgagagtgaggaacatatcagctttatttttgtgcatttattcattcaacaactatatattgtgtataactatatgctacagatacagaaatactatctctctttaatggacctttactctgaagggagagagagataaataacccatccattttaatataatgtaataagtgttaccatttttaaaaagcaccaagtagttaagatgtacagtgaattggggatgggggtgctatcccaggggatgtgcagaggttacagaaggattcttatacgagctgaacttaagctgtaacctgaaagaaagaaggcgacaacctgaaaaatagagtgtttccaggtggtagtatgacaaaagataagatgacgttcttctagaattatgagttgtttccgttagatctgaaccacatgtgggaaaatgtgaggaagaaatgataaggaaatagaggcattagatcacaatgggccgtataggaatttatgctgtgtttgggatgatggtatcgtatggcctggtatgtgagtatggatcagatgttgacgcctacctaatattattattgaataaaaattaaaatagataatatttgtaaataagttttataaatgtgaaagtccagcagacccctccagttgtccctaaagtatcaggtgatagaagtgtcagtgaacagaagaggatggattcaagatatactttagaggtagaattaataagacttggtgatggatttgatattggattcaggaagcgttaagtactgagtatgacttctacatttttttttgagaaatgtgactggtaaaggtgccatttatgaataagagaaaaactgaaggagaagaaaatttgaaggaagataaatctagaagaatttcatgtcggacatgtcaaatgtgggatgcctatgagacttccatgtgaccatggaattgcctatggaagtgtagggttcatggaagagaaatagggtgaagatataaatgtgtgagttattgccataaacctgaatgttcaaagccacagaataaatgatattgcctgggaaatcattgtacagtgagacaagaatacctagaacctagccctgaggagaagccaggaaaggagattttgaaggactatccagagaggtggttgggcagttaggagattatgacattatagaagccaagaaaagctcatttaaaggagtgagttgtcagctatgtatattgctgctgagaagtcttttaagaaaatgctaagatgtgtgccatgaatttggacacatggaagtcattcagtgactttggaatgggtaggttcggtggagaggtgtgaacagaagctggattggactggttgaagtgtgaatatgaggggaagaatctgagacagcacatttggacaactgttctgagaagcttgactgtgaaaagaggctgtggagcctggggtcagtggaaaacagtggtgttaaggcagacattagaaggtgtgaaaacaaccatgaaaatgatccagtacagcaaaagcaggtgaagattgaggagaaagtccaggtagctgatgaagggaattccttgaaaaagtgagaaagaaacaaatgcatagaacaaaaggaggaattggttttttgatagcgggaagggaagacatttgttagacagttactgtaaagtatgaatagaagtgaaggggttgaggatatttccccatgagagttgcagtgatgggtcatgaaatctaagttttctaaaatgtaggagataatgagatggcaagcacaaatgttggtctgtacatttgatcatgagaaaatgagtctgtctgacggcttctctattctccctcctccggcccctcccccacctcagtggagcaggagacaggatcctcagcagaggacagcgtggatggagggagagggtggtgaggcactgagaagttggaagagcatgaagaaggggaaaaatgaaccttgagagtgctcaagtgtccatggcagttatgagtgcctgcttgagacaggcacgtatgagtgtacggagaagccagtttgtttttttgatgttcctacagcagacacagaggagacagacatttagattcatctaggatggggttttgccaggctagtggaacaagggagggaggcgaaggagttgagagtattttccagggagagagaacaatgatgcgttataaaatataaattttatcaaaagggatgtaaaagtaaaaaaaaaaaaaaaaaaaaaaaaaactaaaaaatgttggatcgggggatttaaatccctagtgaagaaaaataattgttccctcaagcgactgaacaaagattttaaaaaggtaggaagttatggacagagtgagatgcttaaattaatgccttcagaggtggttcagtttctgacaagttttaggtgtgaatgtggagtaggtcacagaagacagcagagcaaaaagtcatggaggtaagatcaagaatatgaggggccggtttttgacggattgtacttctggacgaggaggtcacagagaatagtggtaggagtgaggatgcagatggagactctaagaagcaaaggtttttattgaatagaaaaaaataataaccaggaagtcagtagagaacagaaatgtgatggaagaggaagaggcaggggtgtaattatttagataatatgagccttaaagatgtaaggtttgaaaaagatggagcaagctcagaagtttaactggaaaacaaagacaccaaccaacaaaaaaatatgtgcggtatttaaaaattgggtagcccccacttgacaggacacgtctccaggagagcccatgtccccgcctgagtatgagagtgaggtggaggcatctctccaagaattggatgctgtcagggagcgttgatgatgcaggagaggttcctgagtgcagaatggaaggactgcaaaagggtggggaggatgtggagtgcagtccgatgaagggttatatgaaacagcgggtgtgagactacaggaaatcatagatgactggagatttacgcgtctacaggagaggtcagcaaactacagcctatgggccagattcagcctgcagcctcttttctgaatggcctgaaatgtaaggttttttttttttctttttacatttttaaataattgagtatcaatcaaaaggagaatactatgttgtaacacattaggattgtatgaaaccacaatttcattgtccaaaagtaaagtttttttggagtgaagccacactcactgatttatgtattgtctatgactgcttttgtgctacagtggcaagtttaacagttgctctagaggccgctcagcctgcaaagcctaaaacatgtattatactagttggtcttttatagaaaacgttggctgaccctattttacagaattggttatggaagtctcctggagacgagtggtaactggagctgataccagggtcttcaaagcaccatgggatgctacagtggtgtgcaggctagctgtccccacaggcatcataggaaagcatggttaaggctaacacctcccgaaggtgtcactatgacttcgagctttaatgagaacacggtagtcacaggagcaagcttctgatttacctaagcaactgaataattaccttcagcaatcatgtgtgttctggttactttctctgtttgacgtgcaattttatcatctgcttgtgctctctggctctctcacactcccctcgccttcccctcccctcattccttcatcccagttttttatcagctgctaactccattggttaatgcatgagctcctgtctgctcttgtactgtaccatggaaggtgccattcaagtcttagagtggaaattcgtcttctgaagttgagatttagaactgaaataaaaaataacttaaaactcatcagttaaggttgctagttttttcacgccaagatccagtaaaatgttcctttattttcccttggaattatcgggaaggaggagttactggggttgaagaagtctagaggaatgggaattaatgcaacttacatcgagcagttgaggacaggaggaggcaggaaggacagcactgtcaatggcaggcaaagcccttagtcctgagaccaagcaggtgcaggaaagtcacaggagcatgttgaggctcattttgtagtgatggcagcagttttttccttgcctgtcccaggaaggtagagagtttaatctcactccttgcaatcattccactactaattacagacagacagagctgaatggccaggctgattccactaagaaaaaattcaacctaattgatgatgacataagaaagctctctgagaccatttttattagggcacactgcatgccaaggaagcagggacattggctataagagcttttaactaagaatatttgtgaaggtggccaaacctggctcttctcttattaattccaggcctagcttgatgaaggctcttttagttccccttaagaaatatggaataaaattatttagccttaggagattttaagacatctcttcatgaatccagccctctctctctctctctgtctctctcacacacacaaacacacacacacacagacacacacgagaaagaaaaaccttaaaaaatatacccactgttttcttaaaggtcatcaaagggtgttctgaatcattgatatgattaacaattgatatgatataacgatatcataatgaattatgataggctagaacagccatcaaaagtctagtcagctagtttattcattcaacctttgcccacatgatcatgtggccccttctacgtgctaaacctgctatagatattggagatgtagaggtgcataacagagtcactgctctcttggaaattagagtccagtggggtaaacatatataaataaataacaataccgtgtgattagcaatgctagagaaacaaataaacaataataaactaggtggggaggaggcccggaagtttgaatgtgacgaaagggttcccagagcagtgattgctgggatagttttgaaggctgcatagacatttgaaggtggacaaaagagaagacaaacaggcacagatcaatacaatgcctcgtgttttaggaacttcactggtgtgtccagtgggtgtagggggaagtgagatggcaataaagaacccagagatgtaggcaagagccagctcatgggaaccttcacattccatgccacggagcaatgtggagcagtggtaggatttaagcagaggtgggactgactcttatttttggcaattattttggcaataaagaaaagaataaatgggaggcgtggagactcataaagaggatattgtaataatccagagtagataatgagggcctgaattaagacagtaacaatgatgaggaaaagaagagaatggatttggaagctgtaaagtgagtggaaacagcagggtttgttgattgaaggtgaggaataagggaaagagagcaagcaatgtaactcacttttatcttacgagaatggggattcgacaatgctgccaagagagatcagatgcaggagttaagagcagatgtaagggcaaggtggtgaattcagcctgcggtgtctgggaagcatacagagtaggcatttcacaggcagttatgggcctggagctcagcaggtcctccaggacggccatgcagatgtggagatcatgagcacagctggccatctacagtgctgagatggcatttaaaagaataggtttacctggggagggggtagaagtagtagaggagtgggccttatgtgatgctgttatttagggattgaatgtcccaaacttttcctatagtttgttccttctaacatttttaaaattatttcccacgtgttaatcattcttccatatgtttgcacaacttctctcatataattttcagacccaatatatgagtatttgagtcataaataaacagccacattttactaaggagggaactgaggcccagttatttcctcaaggctaccagttcctaagagacgtcgccatactgaggattcaggagttctgtgtttgtctgcttgttttaatacattgcattctacccaagacccaggtgtgtgtgtgcctatatttagattttatgtgaagtgaagtagaaaggcacagtagtagtgtgcccagtgaaagagtaaatcggctattcttttccttcccatacaccgtctttttatagatttcatgtaggtgaaaattccacctggcagtggaatgctaagaacagaggggcaaggcattcaaaagtaagtgggcagagcccatgcacgtgtttccagcaggatgatttggcctacctgctggaaagtagctatggtgcagaatagattttgagaaatgtttataaagactcatttttttccagtcaaaggctttaattaaatgttacaaatacaagggctttcagtcatgtctccctttctcctgaggcccaaacaatcctactccaataggcttcctgctcttctgtagaattgtgctgtggtttcccaagttattcccttctgcacatgggctggtgtctgccctctccatgccaattgaaaatacacagatggcacttccatcttgagtattcctggcaccttgtagttttctcccagaatctgatctgaatttattcattagattgtcttaactatagatttgaccccaccccaggttttctgctccctctgtcccccaagtggtccccttgtcattgaggttttgcttgataccatcactaataaatgggattcttcaggaaagcctgcgttttgctctgcatctgaggatgctgcttgcaaagggaaagcctggcttccctcctccttctatgtgcaagaagcctctagttcatcagccagtgggcatgggcctctgcaggaatgggcagagccctgcatcctccgtgcatttcaacttagctttggtgggaaaagactttcccccatttagtgaaaaaagaactccccagatcgatatatctattcttcaaaaggattatttataagttatttcacttcccatcctccacaaaatatttaatgaaacatacgtaaggctctgcttccccgtggagtgatgttcttttgcctatcatcatctacatttttgcgggctttttcttggcagacatgtgagttgacatggatttggttctgcaccatcactaggggatgatccagaggatcatagcaagggggtaccaagccgtgtgtgtcctgggctccttttacatccttttcagagagctgtagaatctcttcttaaggaaaacacacaccaatgcacgtatgcataatattatttcctggtattcaaaacccctgaggttaacagttccacaattctcagattaagaacccctgccctacaaaatgtattgatggctaaatcataggctgccctgcttcccaaggctgttgggatccaggtagtgaaggtgacttcttatctgatcctgagcacaatggtgtcaggagaaccttaaccctttaggagcctcttaagtcaatagaattcccttaaattaatctgggtgaggaattgaaagcaattaactccttcaaagttatcagcactcagtactggcttatatctccagtgatttagaaaaagggaaagcaaacagccaagatactgaggcaatatgacattgcggagtgctatatttatcccctatcaatgtctttcagatcaaattggctgagtttacaaatcaaaagctgatttatttttttatttttatttttttagcagccatcagctgcactactgcaaatacacagttcccagacatcaagctgcaaactctaaacacccagctgtgtgctttctgactttgatatcatcacgcgtaatagagggtctgcatgcagatttgagctgacaggcctcctgagaaggctcacagcagaagagcacccaactccagggccagcccagcttctgaagccacatctgcaaagaaaacccacgtcatgttgttatgggaagggatgggcctcagaaatgcacagggcctggctctgtggagtacaaagggttcactttcttataattacactttaagttgaagcttctctttaatatgaagctaattattattcccagatttccctatcaaaaaaaaattaagggaatttgtttctacgtatctataaaatgttatagttgatatatgcgtagctatgcatattcaaccatatacacatattcagttccaactatcaaatgagttcttaatatgtgtcaggatctatgataaatgttttgttgatattgatagacacatatatgtgtgtatacacacacacacacacacgaaatttatagttggcaccagtttgtataatatttttattgaatctatatttattgctttatgaaaaaatctggttaataaattaatttaagaactattcatggccaggtgcggtggctcacgcctgtaatcccagaactttgggaggccaagaagggtggatcatgaggtcaggaggtcgagaccatcctggctaacacaatgaaaccccgtctctactgaaaataaaaaaaattagctgggcgtggtggcaggcgcctgtagtcccagctactcaggaggctgaggcaggagaatattgtgaatccaggaggcagaacttgcagtgagctgagattgcgccactgcactccagcctgggtgacagagcgagactctgtctcaaaaaaacaaaacaaaacaaaacaaaaaatactattcatttgcatttctagcttatgcaaagggtatagtgaacatggaagttgtttgaggaagggaacatggtgcaaaagaaggtatggcaaggtggaggagcccaggaagaagcagtttctgtgtatccaacagaaagggtatcctgagagaaaggaggagataagtttcccaggtataaaagaagttcaggtgaagtaaataggaatctgagctgacaaagaggcaatgtcgtggggttgttgccatatgcatactctacgacttacgcacagctcacaagcggccagcatgggcctatttaagaatgctttctcttatatgatgggaaccacctatttagaacaattcagctgtcccatttcccagagttgggctctatgtttgttatcaactgtgtgaggtctgtcctgcagtgttacaacaggcaaacgtaggtttgagcccttcagaacttttcctatgaaacatcttttaaatttgcccatttttggcaagatcatcagattctcttttccgccagccatgctacctgtatccaaaggaaatgtcaaggaactatgtgtaatatatatgtacgtatattacatatatatatagatataaaatatatttatatccttttatttttagttctgaaaccagagacattttttaagctctcagcagttcttacctgggctatgcagctatacctgcttttttaaaataaatgatcatgagaaattatatttattatcaatcacatcctgttttaagtcaagagagtagagttttctagttaaaggatatgtggtgaatcctttgtaagatttattattattaagttcctactggcaaagcagaggtctgattattatttcatttctgagttgagatgttcttgtatcaaggatcatgtgtattaaaaatgtgataaagcctaattagggttgcagtaaaaataaagatcatgatagctacgatttcctgagagcttcctatatgctaagtactttactcatatttagtcatttaatgctcacaataatactataaggtaatcttatgttctccattttacagaagaggaatctgaagtgcacagaactgaactgtcagataatactgtctatagggctcgagtgcagaaatactagagctcatcactgcccccacagtgcagccgggggaagtggtgcttacagctgctatcaactcttcaaccattgctccagcctagtatcaggcctacagaagctatcctatgcagatcattcgacatgaatgtcacattgtggaaacactttttaacactgatggtttcaccctgttgcagcggatattgctgtgtgggttatgtgggtagctcccatgtccccagccttgtctagcttagcggcacagatttgcattaattccatattactgtgcctctcagcacccatctgcctgcctgggaccctccgtttacctcagaactggctctggtatttcttggagtccctgttacgtgcttaaatacaagtcttcttgtgccaccccctttgacagtctctcacatggcctctgctgccacttggagtggggctgtttttgagccttattgttctatgctttccagctcccaggactgcactgattcctcaagggggacctggtgtgaagaaggccttccccagttcatcagcaggccttgacaccagaactcacagtggcaccatacacctctgtattagtctgttctcacactgctataaggacatacccaagactggataatttataaagaaaagaggtttaatcgactcacagttcctcagggctggggaggcctcaggaacttacaatcagggcagaaggggaaataaacacgtccttcttcacaaggcagcaggaagaagagtgagtgcccagcgaagtgggaagctccttataaaaccatcagatcttgtgagaactaactcactatcatgagaacgggatgggggaaaccactcccatgattcaattatctccacctggtccctcccatgacatgtggggattatgggaactacaatgcaagatgagatttgggtagggacacagccaaacctctaaagtctttcatgaaaacagcttctttcctttctggccaagcccactttcttcatgagacctcaaaatcagttcctggggcttgcacatgttggtattgaggaagaggagtctcacctctgtctgtcttatctcccagcatctgagcaaaaccatgccttcatccagtcaaaacagaaaaccttgaatgttcatcagccatcataatggcactgggggaatacaactgtccttgaggtcagcctgggtttaacaggaacacctgatgcaacctgagatggtggagagagcagaggctgcagagctggtgcaggactggaatgtcactgctagtcatgggatatgggctaaattttaaaaatgattccttccaactctccaattctgggattctatgttctgtatctttttcaatttctgacgtccaaagattgtatctcagctggtatatatgccataaaaatattaagcaaggaggcagctgtgtcctctcctctccagtagctacagctgtactcctgacaagcttattcttgggtatgataaaaatgatcactgtgggtattattattttcagttataaagatttttaatgcccaatctatgaagtcagaaatgtgggattttcttttccaaagggatgttatgcacacaagacagtctctgtcattcgattagttgtaaatgctaagctcagcactttggacaacaccaaaacccctgtggggatttgggggcaggtgtgatcacatatccagcttgcttcatttccctgcttcggttgtcgtattccacttaatgaaatagctgtatttccaaaaagttggctgtaaaacaaatttctgttagataaatcatacttcttcattgatctacacttttaaattaaggatgccttctcctgaggaaataattggccccaaaactaaatataaattatactacacactcgataaaccttttaaaatcacatatttaaagaaaatcttttctgttagaacactaatagtgatgatatttcctaaagtcaggaaatacaatgatcatgctaagaactacgactgtacatggtgttcttttgggattggggccacaggagggttaggtgagcaacaaggggtctctgactttttttcattgaattcaacgtgttgttctgggtctgtcagccagaagttagtcaataagaagttggcaaattttaaaattatgtaaactggtttcctagctgtcttgagagccagagatgtccaagaacctggtttctgctgtcaaaggccttcaatcgcattggaaaaagaagccccctgtgtgcagcacaagacagctactcaaaaacttgattacagttgcaggagcagtggattggacatcaggaggcctggtgtgctccatcactgaccagatgtgtgcccacagactcctctaagcttcagtttcccacaagaaaaatacgaggcttgagcgaaatcactagttcccaaacttgcctatttgtgagaatttcctaggaagattatgcaagcacctcatcccaggagattctggtttagtgggtatgagtgggacctagaattctatattttaagcaactactctagtgaattctactgcagacagactatgtactagcagagcaactatggaattatataaccattcatgtccccttaagctctttaattctgttatgattttaaagactagatgaactgaatgtgcaacaatagtgcagaacagccagaggcaccaagagttaggagacaaaagggaatgtattagtgtcccaggactactgtgacaaggcacaaaaaactgggtgctttacaacaagaaaactgtacagtgctggaggctagaagtcaaaatcaagtgattggttggaccatgctctctctgacagtgacaggggagaaccctccctcgcctctcctggcttctggtatgcaccagcaattcctggcgttccttggctcctagaagcatcactcctatcacatggtcatcttcaccctgtgtgtcttcacactaccctttctctgtgcatgtctgcccgaatccctttttataaggacaccagtcagattagattagggtctaccataatacctcattttaacttaattacctttgtaaagacctttttccaaatatagtcactctctgaggtactgatggttaggatctcaacataccttttttgggaggacacaattgaacccataatagggtgtttgcaaggaagagttaaaatttgaaagaaaggtggtatttgcttagatagatagggcacagctttctaggtgacaaaaaaaaaaaaaaaaaaacaatctgtgaagaacaaatcatcatgttggtccaggatgagaactagcatggcctggcaggagagctgcagcagtggcagtggtggcgtggtataccagttgtttagactaagttctacagagggcttctcctgggcccctcagtgtccccactgcactccacgtgttgtctttcacagcaaccctagaagtaggtaacgttattctgattgtgcagatgaagatatggtggtacaggggagttaggtgacctaccccatcatgaaactagagggtagagaattggtttcttctgatcccaaacttttgcctcttaggacgatgatctgttgccttcttcatagcacttgtgcaaaataaacttgggtgaatagatcagggctactttgtggagggctttgataataagggagtagagtttgtgtttgatgtgacagaaaaataaggagccatttctagtgtctgaagaagtggaccatgatgaaggggtatttcaggaagatgagtgtgttatttccacctgaggatgcattttctttacagaaagaaaaagcagacttataatgagaagctgttgaccgtgaagtttcttttcatagggttatatcaagtggtttgcctcttccccactgatgtctcttaaccaagaatatccttcagcactttaaagactatgcttgctttttttttttttacccaatatgctttgtaagttcctcacactagtgataaagcactgatcacttcatagccacagcacaaatgcttttaaacgaaacttttcgttgatttattaactctagaaagtcagattgcagtttagtgttttggggggcttgtttgaggcatctcctttaggaacctgattttgggtggttcaaagtttattttgttatgtgtaaactgaccaactttctctctggttttgccatatatgcctctagtagagaaaaaggtgggtgaggagaaaagtgagcataatgacaatgaaagcttaaatttattaagcatattactatgtacaagtcactttttacatgccttacccaacttaatcaaaaagtgtacatgtaataactggtgagcaatgaagtcattgtgatttctctgggattgcacatttggtccagggaacataggaaagtaggattaagcctcactgttcctgcaggatgacttgaggaaaaatctcctttctctggaattagaaatttggatcagtagagaccatacgccttccccaaaacttgagccacccaacgtcctttcctacacaagatcacctgacataaatatacaaaactacacataaattaatgtggcacccatgtccccacagaaaactgatgagttctcgattttgactgccttaatatttgtgtaactgcatttcagtccaggactgtcatgcctccaacaggcctttccatttggatgtccatgacaagttggcccctgcaaatctcgctgtggccacaaaagagcatatttgaattatggaattgaaacagatgcatgaactttagctggagagcacaagagatccagagaacctctgtctttttgtttgtttccccgctttggtgatgtaatacacagcttcacaggagacctgaggtcctatcagtccctgctccgaccctggagctcaatccagaaacagctgtccagagctaatttatttcctaatgctgcggcactgttaatttataaattacactggtaattcgagctattattaatttcagatggtgtagggcaagcctaattaaaatatgacaccaattgccacacatatgtaccaaggactaccatttaaaattaatgggaatattaagtgtgacactggtctccgagatgcttggcacagtaattatagcattctggcaggggaagatctgacaaatgtaagcccgtggttggtagcaaataaacaaggacaacacaagaggaattacagattcttcatttaaagctcttctcaattcttccacccatcctcaaatcaaggttagtacctttcccctaaagatgcttatcaaacaatattcataaaggctactgagaccattagaagtgtcttactggtaggaactatgagtctatttgggttaatgttgtttgtcctcttcacatcctggtctttttggctgtgttttctacttatgaagaggttccttctttgtcttgtgaatttagtatctctttcttgtttgttgtaatggacataggctgttcttttcctcttctgtatgtaacagaggcaagaaaccgtctgtacatacatagtgtagtttgcatatggcatgaagatgtatgagatgaggccccggttgggcctactgctgggcagtggcacagacttatcatggccaaagagtgctgatcgaatggaacaaggcagtggcccttgttcacaagaccatggtcttgttgttgttgctgttgttattgttattgtggttatcttgacaaaacagtgacttcaacactgttatggaacacatacaatcatcccttacataccgcacacatcatcccttgttgtatcggttttttacagctactgttttcgtgctctgggccagcagaaacacgtggcattatggaagggttttctcacctggagagaaatgtccctttgttccctttcttgggccactcatgttaatacagtgctgcaccccctgaagctgtgcctccaaccagattataggagtaataactaaatcaacaggtgggcagcacacgagagttttggagtgctttcgtgcatgtgtgtgtgtgagtgtgtacatatatatgtaggcatgtttgtgtgttagtctaaatagccccgtgaccctgtgaggtattaggattgtatgtatattatgtttgggaaaatgcttctcaattgctagggacagccttatgcctgttgtctgctaataatcattaattactagcacctcatttccttttaaaggtatccaggtttaggatgctgtctttctaattaccctcatttaagagagaagggaggatagcttgggatgtaagccctaacttttgtttttcattgtcttttggcaaggaagcgaaggctcaggtgcctctgggagagaactttgaaatctcctctagccttaaatatcttggtctttcaataactgagtgctcatggccagacgtcaggcacagagtctggtatgtgaagcgttgttattattactcataatttttcactgaagacaatgagtcccgcaatgattaggggactgagtggattcgcagccacgtcgcctgatgaatctctgacatgcttacaactaggcatcgagtgcggagtcccattgctggtctgtctttaggatcttgtacctaggagctctagcagatcgaagtttagcacgttgatttctgcctatccaattaattgtctgagtcaaaaaacagaaaattaaattttttatgttagtgtttctgctacctttgtgatgcacgtgtgtgtgtgtatgtgtatgtagctgctggtgtggcattttcaattaatttatgctcaagtgtgcagtcataaattttatattcaaggctcagtctaagtgataccttgagatcagaaagagttaaggtgcctgactcagatcccagagcacgacggcttggtaagatacaggcagtgtaaatgtcaaaattattaatcacttattgggaccagtaattctctaggcactgtgctttgttcagttaggaacacaaacatttcagctgttccactggggagccaaggaaaagttggtggtgcggaggtgtagaagagacggaggagggataacccacacagttcctcagaatctgaacttacaactggcaaattatctgcagacataaccattttatactttgttttctaagtgaacatgtttggtcttttttttccttgtatttcaccacacgttaccggttttcccgcagcggttggctttgtgagtgaagacgaatacttggaaattcagggcatcaccagggagcagtcaggggactacgagtgcagtgcctccaatgacgtggccgcgcccgtggtacggagagtaaaggtcaccgtgaactgtaagtgttctcaccaccacgcgccctgcacgtgcatcaggctggcctgttgtcacagccaccacccagagcccattggcacagccagctactgacttagggtgggaagaatgcagcaccactttccacactctgctttcaggagcaaacatttcaaactcgagtttttgacacttcaaggtgtcacagtgtcacgctgaaagaaaaagtagctaaagtaactgaaaataatgccaaacttgacttgcatggctggcagatcattaaatggcattcagctcataattttttaaacacgtcttcaaatccaaaattttcccataatttactcacacaatacagttgtgctggagcctctcactgtctagaccagacatctccataatgggacaagaaaccatgtgctagagtgtatgaaggaagtttcaaacttccatttatggtatgtctattatatctcattattttacaattatagatgtgcatggtatacatacaaatagttacgatatagatcttagaggatgtaacaataaatttgcttgttactaatagagatacagaatccaaaaagtttggaaggtgctgtgtggacccctcattctcctttctcagccttccagattgtctctgacatcaatcctacttgaatttgctacctcctttcactcttttccctctgggtccctcattatgtaccttgccttagctccctacaacattctggaggttttctctgctgtgcacattccaggaagacttacgaagcaatagaactcaataactaaatcggcaaacgagatgacttcccttcaaaacttgggtggcgtggagttaggagaaggatactgtatctaggagaatatccagtctttcagatttaggtttgtgttacaatgtgaacccagtcaatatgaagcggtttaagaagcaaggcaataggtataaaaatgctgtcattttaaaaatcatatcacaagtttttacaaagggacttaagaggatttacagtttataaagatgaacttaaaacataaagaaacagaagcaaagaaaaaatacgcttaggaaaatgagtgaaagctaggaaaacctcagcacatgaaatattaccacaagactgctaggtgcaggtgcagaatttggctcagccttgctaaagcaaagagggaaacatcacctgctttaagatttatgttgtccataagataaaagcaaattagttgcttgggagaaacactgcttttcgtggtactgagaccctagagaaaattctcttcagggtctccacaaatagagcactttgggagagagtcagcaacatcatgtacaatatttctgcattaaatagaatagccagtttattgtggctgtttttcataataccctttaatataaactggtagaatgtgaagagtagtttggtaaagacgtcaaatgaatgcaaaccaagtgcgtaggcctagcttggtcacttgctctggtttgattcagggatctgttttagaataccaagaatgactgatctgtatatccttcaggcaattctccttgaatattatttcttgcaactgagcttttgatgggaattgaatagttcgaggttatatacttttggcaagaacctggtgtgcagaaattctagaaggctgattaaaggtgctgactgtcaacccgtggagtgtagggttgatgggctggcatcatcctatgaaagttaaaaagtttaaacagaaaaaatgcttgagtacatggtcatttcaactctgtacagaggagaacaaaagcagtacatgaaaggaagacccagctttttcttagagcggcatcaaaaaggtttttattctctggtacaatttatgtagcagttttaccttctaagtaagcagagccagggcagagactgagaaacaaaatcaacaaatgaagcagccttcttcattttaaaatgctgtagatcaggtgcagtgccctgtaatcccagcccttttggaggctgaggcgagcagatcacctgaggtcaggagttggagaccagcctggccaacatggtgaaaccccgtcgctgctaaaaatacaaaaattaggcaggcatggtgccgtgcacctgtaatcccaattacttgggaagctgatgcaggagaattgcttgaacccgggaggcagaacgtgcagtgagccaagatcatgccactgcattccagcctgagccacaagagcaagactccatctcaaaaaaaaaaaaaaaaaaggtgggggggcggctatgagacatcttctttttgcagatccaccatacatttcagaagccaagggtacaggtgtccccgtgggacaaaaggggacactgcagtgtgaagcctcagcagtcccctcagcagaattccagtggtacaaggatgacaaaaggtaaagcttccttctttcctatcccacccctacccccatctccaggagaaacttttccagggtcctgattccacattgttgcaaacgagttctataaaatcctcttctgaacttatctctatagggggcaaatgtgcaaagaagtcttttcttaacattaatggatttcagctacgtttttaatgtcaccatgtagaattatcactggccaaccaacagatctgaaaggtaactttttttaggaaggcaaaatcacaaaggaaaggccaccaggagcattgtaaggcctgtgaattttttataggccaagaacataatgtgttctgcctgaagctatttttaccacattctcaggcttgcgtaaaggagttaggaaggctctcagggccctgggagtggctaataagttagctgcagctagtaggtctcccctcctgttccagacactatcagtagcggtgtataagagtccatgacccaatttagccctccctttgtgcccaagttgttcttttactgtaggagaaaagagaagggactattcccttccttcccattgtcacagcatcctcgggatatttgttgtgagtcactgaagatgatcatttccaggctttatcaaatgacatatcagtgcagggatcagtagctcagtacagccaggcaccatggcaattgctgttatcaaagagccatttttaagggggatgaacaacgggaaatgggcaagagctgcctgtgttcagaacattttcattgaaaaagaggtggtggtataggggatgctagagagtcctgaggtgtatgtggggtggagtaagagcaaggagtgggggaggccaggaggctgagaaggaaaaacaatgaagagggcattctgagaaggagagcagcatgagaaactgcaggccaggagcaagtgaatggccgcccacgctgtgtgcacgtcttcagccagccttggctttgtttccttatgaggtcagtcagaaacctaaagctctttctagtctctagatcgaaaattgaattttgtttagaaccacgtcaatcagttttaagattcactgggttttatcataatcctcccaaatgaaaagcagtgttttgtttttttaaaaaaaaatttttaaggacacattctggcagcttctagtgagatgtattatattcatgtagcccattttacagatgaaagaactaagacacaaaggggaaaaacaaactcatgaagaaatagagctggctttccccttcttccaagaaagaagaatcaagcagactggagcgtgtttttctgataaatatggtttccttacttagaaattctgtttcacttatgcgtttcctcttcgaccttcttattgtactaagaagtaaactgaggcataaaaattaattattgaaccaaaccaaacaaaaaacctattgagctatggggtcagttcccaaatcttcaattgtctaggtcttaatgaaaagtcatcagctgcgtcctattattccaattctttattggagaaaaatagaaaaaatacatataagggaaagcaaaatcttagaggaaaataaagcaaaagtggccaatggcgagtaaaaggatgagagagctctcctctgtgcagcatctctggtcacaatagggacagctgtccctgccaccattcacccaggaggagagagcaggctggcagggccagggacagtcttcagaggcccctggctcaggcagctttgtttctgtctttctttcagttcttctgatggcctctccttttctcccctttccatttagtggtttagtcagttttcccttccctgcacatgtatttatttatttccagtgtgctggcatgagacaggggctgtctttcctcctggcacccagctcagctgcagcatccctgcctctgaggtcctggtcacagcaagttgggtctgccaggtaggtctcccaaggcatattgtgtctgccctggggggaaggccagctctagcccatctcccattttcagtgagatgagcagactaccaaggcagattaaaggaaactgtgtggtgaggacaggcagttttctcaagagttagttaggtgagaagtcttttggccacatgccagaatgactcaactgcacgctattgtatgtgttatccaacaaaggaagaggaatggaatgctatacctacggaaggccacccatccaacaggggcattgaccaatgaaaagtccacagctttggtaagaaactgaggcctggaagcagtgcgggatggaggggatgtgtgcccgcacagagaaggggaaagcgtgtcctcccaggagctgcaaagcctgcaaagtgctgctggccccctgtgctgtttttagctaaagacatttcagagctgtcaagcaggagcctactttcagttaagtctctccccactgcagagctgaaatctcattcacagtttggttatgatgggaaagcttcctccccatggtggacgaatggtgtcaaaacggccagtgggatcaatcagcctgacttgctcgcagaatcctcccggtgagtggtatggacagcaccccctagaggatcaatgtatacatagcaagctggaaatgtaaaagtggcctgtggctgcacagccggatgcctcattccatttggacagtgctagcattttaatgaagccgtggactcaggccagttcattgcccctagcgtttggagaggaaggctcccagaggaacatctacataatgaaaagcaaggcaagtctgtccaacctatcttctgacttccctggaggcagatgttgggtgagaactccggccagaacctgcctctcttttctgatcaaggttactgtaagttgcaggagtggagaaattattctgtaatcccacagagacaggtcttcagataatgacaaagcagctgcactctatgccaaaaaacactgtgacccagggatgggcaagagtcatctatgtctaactccatagaaatacattatactgatgccattgtgcggtccgcaaagcatttcctcatcattgtcaaacagccttgagtactgtttgtttttctcaatagcatccatttgccccaaagcatgtcccctgaatctgttccagtgtgctcccgccatgttattatctgcttgctacaagctgtgctccagccaggccctaaacaggaaacttagctttgtgtccatattccctgagatccttcatcaagaaggggttttttgccccaagagtattcatctttcccatagcatagaatcagcttcagggcaaggattacagattgtttgtttcagggaaaaagtaaaaggttggcttaaagctcattctaagaaatggacatttcggaatcttgcaaaggaaagtaggtggtatccatgatcgccataggaattgctgttaacaacttcctgagaaggaggacatgtgcctactgactccaatagcagctttctccttacccttttatctgcctggtaatagaatccatggttctaataagcatacctcacttcccccaactaactaactccctgtggcatttctgtagtggcccccagaccaatgcaagtccttgtggcttactgggctgccattgtggagctcagggagactgtcctggctctaaagggacatattcttgggaacctctaatccttccagactaatcctctataacagtctgggcagatcactcctcccaagcccttcagagtcccctgatgagaaaaatgagaaaatgatgatttttctcctcttcatagccaaaaaattaagtattatctatacaatgcaatgcttctggtgcttcaggagaaattagattaccaggtgctcgaaaaacatttttctttcaaattcctcaggtggctcttctctcagaagtttgagtttttcatttgcatggttgtcatcatcaccatcaccatcatcatcatcaggcccacacatttgaaccacctactgtgtgaatcgtattgctctgaatgccacacagctggcaggggttatttgttgtggtgttgctgtcagactacaaagcaaggatgagaggctagggagatcagatgttctggtaggagtgcccctgggcacatgtgtgaaaatcaagaaacaacgtgtcactcactgtctgtgaactactactacattatggtgtggttgagtggatcaaataatggttataatgatgtcagaaaggggggcaaggagaagaccaggaatccctgggcctatcttcttcctatgaggacacataaccatcttgttttcttcttttttgtcttttgtttctctcagactgattgaaggaaagaaaggggtgaaagtggaaaacagacctttcctctcaaaactcatcttcttcaatgtctctgaacatgactatgggaactacacttgcgtggcctccaacaagctgggccacaccaatgccagcatcatgctatttggtgagactgtgctctgagctgggcaagaagaggggagagggtgcagaacgggagagctgggtgggagggcccctcaaggccagggtcagaggttagcagggtatcagtggacatggagagggaggaaaaaaaagagagagacacagaaagaaatggagagagagggacagagagacagggaggaggcagacagaaagagaaagaacaagagatacagtttacatgtatacaaagtagtatatgtatagtacatgtataaaagtagatctcagaagtgggaaaaggaaaatgaaaaagaatgttcatgtttcattctataatggaaaagatcccgagataggagaaaaatactttggaatgccaaaaatgacatttgattttttttttctcagtgatgatggctcctaagctgactgtgggaatcataattgggtaaaatagtcaagaactcagaggggaatgtttgctatttcagtctttgcttactggcttagtgtaaaattttcctttttccaaaactgtctccagtcgctgggacatgaagagccccaccttcgtcacatatctggctactgtattgatatcagaagaaagtgagcgagctcccttgtaaaccctgatgcctgcccctgctagcagacagctgtgcagacatgagcctgccttcctggtggtgccaccaggcagggccctgggcctctcatgatggctccatcccttgatgaacgcagattctccctaaaggccacaggattaaattccggttgtgttttgggcaaattccttcataccccatcaagttctttgagcttgagatttttcaaacctgtctccccaatccctcatgttaacaagcactcttgaatgtgatggggaagtaaggggaggcatttgacagataatttgcaagaacacaaattccttatattctgaaaactttgggataatcccatggcccagccatgtgccctcggtgctagcgtatgtggcttgctctgaatcacgagcctgcactgcttcaccacacgatctctgctcacccattacatcctcctgcattctacccggcacaaatagtaaatcccagctttatctgagagagctgggaaggagaaagccgcccttgatccccgagccagtggcttggaatgggcagagctgtgatttgagtgattgatgtgtctggcatctctcacacagggatgatcataagagccccttgcatttttcatgcctttttgcctttttggcaggcgtctgtctgcatgaacagagaccaggattaggaaggaacagacccctccttcccttgctttgcaaatctaaatctaaggctccccctcagtttcccattaacccaagtcctgctctccacccacagcactcctcatcctcacaggggtagtcttccccccgccaccccccactttgacctactctctcctgacttggttgcatgaaatggttcagccattggctttatcatgattgtatacttccccggcttcttctccttaagccatctcaggatgagaatagggagaagcagcaaacaaacagttctcgtaagagttgaatagatgacatttatgacaaggaaagcagtgaagtgcaggtcataaatatgctcttttcagcaggcacacatgtagcaattacaatgtctacttcccatgccccccaccctatgggtctatcaatcagcatctgccctgtgcctcctttgggacgtttctaccattgccagctctctggcgtccagggttttctaaaaaggacatggaaaagtagtagtatgtattcaaatatgtttagaaagagtgggtcacaccaagatgagtggggtacatgtggggatgttctttaatgccagaagtcccggagccttaacatgctaaatctctaggggagaaaaagtttgcaggatgtttcaatcagaaaccaatttaatttgttagcttcagttgagagatcattcctgaggagtccatcactagcaatgctgcctgggtaacataattctgtggagctcgcaaaccccattcctgtgtgagatgagtatttgcagccaatagttcggatgttattgtggctcctaggttcattattgaggctcaccatcaatgaggtcttttgacaaatatgaatttgtttgtttgttagggaattttccatgtcagtttccattaaaagccaacaagcacacttggggcaggttggaaagcagcatgtactttttgcgaatatacaaacttcttgatgaagttagaaaggcagcaaaattatcatcattttgccaccaacttgtgcataaactgcacgctctctccaagtggcctagacgttgagaagtgaggaattctggtgcaagagaccatagtcggcggtctgggaatacttaagccaaacgggagcaggttagtccttcccatcacaagcacctgatcgctaaggtgacagggcttgcaggggcctctgagagttctgctcccgcactcctgaatcacagtgctctggggagctcgttcgttcctaccgtggtgccaggggcaaaaatttctgaatttggtgtcctaagatgaaacgatgggggtggggaagtgggaaacaagtctcatctggaaggaaactttagtcctttgttatccagttagtagcatggctcagcatgagctaagagtgaatccaactgcaccagaatatgtatggcgtaaccagctccctgccttcccagtcacggcattcaatatggaaacataaagcatgtcagcgtttctcttgccgcaccttgtcctacgcctttggtttctgtcttccttttttttatataatcccccagaaatgtctgtgaaaggcagtatacaaactatatatgacaaatatatagcactgtatataatatatgtgtttgttctcatttttctctcctgtgtgtccctcaaccgatttagaactaaatgagcctacgagctcaactttgttgcaaggtcagtatcttccttgctttatgttttgtctccccttccctctatcccagaggcccccttcccctgctgtgcattacccgaagcacttgtctgtaaagtgtcttagaggatgtggaaggctattgaaggaggtgattgattgggagccagggagacttcaagctccctttgctttgctcatcccttgctctcactcccccaggagggctgggaaggggaaagaaagaaagaaaagtatcgttaaattctcaatgcccagggatcagcacaaaggcaaagggtagagagtgagtctgggacccataggaagactacttcaactgactgagcagttttcataaaaagggtcttattgatgacccctcagcagcagagtcagacaccaagcacatgataattcagatattctgtcaaacgcatcaactggctcatgaggttctccaaaggaggaggataggcatggcactgcatgagtggttgccaatacacagtgatttctaggggtgctactggggtccaggttagggcctgacgtccagtagctctttggtcttgggtgactcactaagcctcatttagactcaatttcctcttctttacaatacagttgatctaccttatccaccgtacagagttgttccaacagtcaatggagaatgcatgttacaaaggctttgaaaactgtgaggtgcatgttgaatctccaggcataaactgaaagacaaggatgcccctcagtggaacatcatagggggtccttcactcatttctcagccccttctccacagtccctttacatcctcttccacttccagtcctcccctgcaaatatctcccgcgtctcttgcctgtctttgcacatcccttccaattttctcactagcctagagtgagtgactcattaagactatgactatgactaagcatccaagcaagcagtggaataaaatgggtgccgcgtgcactgctgtcaccctgaggacagtgctgaccacagcagtagcctttcaggaaggcagctgtgaagccagggaggggaatgcttctcccaccttccatcccaatcccctgacctcctctccccacctcaccccaccctgttcatcccctcacattctggccttgcaaactgtcatcagaggatggctgtagactttggaggtggagggggagatgaaaagaaatgcattacatgggaaggtgcatgacagatgaaaaaaagtacctttttatcatggaaagagtgagggctgcattactcactttagtgatgtacagcaccacagcgatgagccacaagcaagaaaatgaaacaaagaaatagaaaaagtgaagtcaatagacttattcagattcaacctatgattcaacttacgtttattgaacctccatgtgactgtattcacagacgtaaaatagagagcagtagaaaagtggctaacagctgaggagccaagatggccgaataggaacagctccagtctacagctcccagtgtgagcgacgcaaaagacaggtgatttctgcatttccaactgaggtaccgggttcatctcactggggagtgccagacagtaggtgcaggacagtgggtgcagctcaccgtgtgcgagccgaagcatggcaaggcatcgccttacctgggaagcacaaggggtcagggaattccctttcctagtcaaagaaagcagtgaccgtcggcacctggaaaatcgagtcactcccaccctaatactgtgcttttccaacgggcttaaaaaacggcacaccaagagattatatcccacacctggcttggagggtcctacacccacggagtctcactcattgctggcacagcagtccgaaatcaaactgcaaggcagcagcaaggctgggggaggggcgcctgccattgcctagttagttgtttgattaggtaaagcagctgggaagcacgaactgggtggagcccaccacagctccaggaggcctgcctgcctctgtaggctccacctctgggggcagagcacagacacaaaagacagcagtaacctctgcagacttaaatgtccctctcagacagctttgaagagagcagtggttctcccagcatgcagctggagatctgagaacaggcagactgcctcctccagtgggtccctgacccccgagtagcctaacgggaggcaccccccagtaggggcagactgacacctcacacagccgggtactcctctgagacaaacttccagaggaacaatcaggcagcagcatcagtggttcaccaatatcccctgttctgcagcctccgctgctgatacccaggcaaacagggtctggagtggacctctagcaaactccaacagacctgcagatgagggtcctgtctgttacaaggaaaactaacaaacagaaaggacatccacaccaaaaaccaatcagtacatcaccatcatcaaagaccaaaggtagataaaaccacaaagatgggataaaagccgcaagatggctgaataggaacagctctggtctacagctcccagcctgagcgacgcagaagatgggtgatttctgcatttccatctgaggtactgggttcatctcattaaggagtgccagacagtgggtgcaggtcagtgggtgcacgcaccatgcgcgagccaaagcagggcgaggcattgcctcactcgggaagtgcaagggatcagggagttccctttcctaatcaaagaaaagggtgacggatggcacctggaaaatcgggtcactcccacccgaatactgcgcttttccgacgggcttaaaaaacggcgcaccatgagattatatcccccagctggctcggagggtcctaccccacggagtctcgctgattgctagcacagcagtctgacatcaaactgcaaggtggcagtgaggctgggggaggggtgcccgccattgcccaggcttgcttaggtaaacaaagcagccagaaagctcgaactgggtggagcccaccacagctcaaggaggcctgcctgcctctgtaggctccacctctgggggcagggcacagacaaacaaaaagacagcagtaacctctgcagacttaaatgtccctgtctgacagctttgaagagagcagtggttctcccagtacgcagctggagatctgagaacgggcagactgcctcctcaagtgggtccctgacccctgacccccgagcagcctaactgggaggcaccccccagcagggccacactgacacctcacactgcagggtactccaacagacctgcagctgagggtcctgtctgttagaaggaaaactaacaaacagaaaggacatccacaccaaaaacccatctgtacatcaccatcatcaaagaccaaaagtagataaaaccacaaagatggggaaaaaacagaacagaaaaactggaaactctaaaaagctgagcgcctctcctcctccaaaggaatgcagctcctcaccagcaactgaacaaagctggacagagaatgactttgacgagctgagagaagacagcttcagacaatcaaattgctctgagctacgggaggacatttcaaaccaaaggcaaagaagttgaaaactttgaaaaaaatttagaagcatgtataactagaataaccaatacagagaagtgcttaaaggagctgatggaggtgaaaaccaaggctcgagaactacgtgaagaatgcagaagcctcaggagccgatgtgatcaactggaagaaagggtatcagcaatggaagatgaaatgaatgaaatgaagcgagaaggaaagtttagagaaaaaaagaataaaaagaaaccagcaaagcctccaagaaatatgggactatgtgaaaagaccaaatctacctctgattggtgtacctgaaagtgatgggaagaatggaaccaagttggaaaacattctgcagaatattatccaggagaatttccccaatctagcaaggcaggccaacattcagattcaggaaatacagagaatgccacaaagatactcctcgagaagagcaactccaagacacataattgtcagattcaccaaagttgaaatgaaggaaaaaatgttaagggcagccagagagaaaggtcgggttaccctcaaagggaagcccatcagactaacagcggatctctcggcagaaaccctacaagccagaagagagtgggggccaatattcaacattcttaaagaaaagaattttcaacccagaatttcatatccagccaaactaagcttcataagtgaaggagaaataaaatactttacagacaagcaaatgctgagagattttgtcaccaccaggcctgccctaaaagagctcctgaaggaagtgctaaacatggaaaggaacaactggtaccatccactgcaaaaacaggccaaaatgtaaagaccatcgagactaggaagaaactgcatcaactaacgagcaaaataaccagctaacatcataatgacaggatcaaattcacacataacactattaactttaaatgtaaatggactaaatgctacaattaaaagacacagactgacaaattggataaagagtcaagacccatcagtgtgctgtattcaggaaacccatctcatgtgcagagacacacataggctcaaaataaaaggatggaggaagatctaccaagcaaatggaaaagaaaaaaaggcaggggttgcaatcctagtctctgataaaacagactttaaaccaacaaagatcaaaagagacaaagaaggccattacataatggtaaagggatcaattcaacaagaagagctaactatcctaaatatatatgcacccaatacaggagcacccagattcataaagcaagtcctgagtgacctacaaagagacttagactcccacacattaataatgggagactttaacaccccactgtcaacattagacagatcaacgagacagaaagtcaacaaggatacccaggaattgaactcagctctgcaccaagcggacctaatagacatctacagaactctccaccccaaatcaacagaatatacattcttttcagcaccacaccacacctattccaaaattgaccacatagttggaagtaaagctctcctcagcaaatgtaaaagaacagaaattataacaaactatatctcagaccacagtgcaatcaaactagaactcaggattaagaatctcactcaaaaccactcaactacatggaaactgaacaacccgctcctgaatgactactgggtacataacgaaatgaaggcagaaataaagatgttctttgaaaccaatgagaacaaagacacaacataccagaatctctgggacgcattcaaagcagtgtgtagagggaaatttatagcactaaatgcccacaagagaaagcaggaaagatccaaaattgacaccctaacatcacaattaaaagaactagaaaagcaagagcaaacacattcaaaagctagcagaaggcaagaaataactaaaatcagagcagaactgaaggaaatagagacacaaaaaacccttcaaaaaattgatgaatccaggagctggttttttgaaaggatcaacaaaattgatagaccgctagcaagactaataaagaaaaaaagaagaatcaaatagacgcaataaaaaatgataaaggggatatcaccactgatcccacagaaatacaaactaccatcagagaatactacaaacacctctatgcaaataaactagaaaatctagaagaaatggataaattcctcgacacatacactctcccaagactaaaccaggaagaagttgaatctctgaatagaccaataacaggatctgaaattgcggcaataatcaatagcttaccaaccaaaaagagtccaggaccagatggattcacagccgaattctaccagaggtacaaggaggaactggtaccattccttctgaaattattctaatcaatagaaaaagagggaatcctccctaactcattttatgagtccagcatcattctgataccaaagctgggcagagacacaaccaaaaaagagaattttagaccaatatccttgatgaacattgatgcaaaatcctcaataaaatactggcaaactgaatccagcagcacatcaaaaagcttatccaccatgatcaagtgggcttcatccctgggatgcaaggctggttcaatatacacaaatcaataaatgtaatccagcatataaacagagccaaagacaaaaaccacatgattatctcaatagatgcagaaaaggcctttgacaaaattcaacaacccttcatgctaaaaactctcaataaattaggtattgatgggacatatttcaaaataataagagctatctatgacaaacccacagccaatatcatactgaatgggcaaaaactggaagcattccctttgaaaactggcacaagacagggatgccctctctcaccactcctattcaacatagtgttggaagttctggccagggcaatcaggcaggagaaggaaataaagggtattcaattaggaaaagaggaagtcaaattgtccctgtttgcagatgacatgactgtatatctagaaaaccccattgtctcagcccaaaatctccttaagctgataagcaacttcagcaaagtctcagggtacaaaatcaatgtgcaaaaatcacaagcattcctatacaccaacaacagacaaacagccaaatcatgagtgaactcccattcacaattgcttgaaagagaataaaatacctaggaatccaacttacaagggatgtgaaggacctcttcaaggagaactacaaaccactgctcaatgaaatcaaagaggatacaaacaaatggaagaacattccatgctcgtgggtaggaagaatcaatatcgtgaaaatggccatactgcccaaggtaatttacagattcaatgccatccccatcaagctaccaatgactttcttcacagaattggaaaaaaaactaaagttcatacggaaccaaaaaagagcctgcatcgccaagtcaatcctaagccaaaagaacaaagctggaggcatcacactacctgacttcaaactatactacaaggctacagtaaccaaaacagcatggtactggtaccaaaacagagatatagatcaatggaacagaacagagccctgagaaataatgccacatatctacaactatctgatctttgacaaacctgagaaaaacaagcaatggggaaaggattccctatttaataaatggtgctgggaaaactggctagccataagtagaaagctgaaactggatcccttccttacaccttacacaaaaatcaattcaagatggattaaagacttaaacgttagacctaaaaccataaaaaccctagaagaaaacctaggcattaccattcaggacataggcgtgggcaaggacttcatgtctaaaacaccaaaagcaatggcaacaaaagccaaaactgacaaataggatctaattaaactaaagagcttctgcacagcaaaagaaactaccatcagagtgaacaggcaacctacaaaatgggagaaaattttcgcaacctactcatctgacaaagggctaatatccagaatctacaatgaactcaaacaaatttacaagaaaaaaacaaccccatcaaaaagtgggcaaaggacatgaacagacacttctcaaaagaagagatttatgcagccaaaaaacacatgaataaatgctcaccatcactggccatcagagaaatgcaaatcaaaaccacagtgagataccatctcacaccagttagaatggcaatcattaaaatgtcaggaaacaacaggtgctggagaggatgtggagaaataggaacacttttacactgttggtgggactgtaaactagttcaaccattgtggaagtcagtgtggcgattcctcagggatctagaactggaaataccatttgacccagccatcccattactgggtatatacccaaaggactataaatcatgctgctataaagacacacgcacacatatgtttattgtggcactattcacaatagcaaagacttggaaccaacctaaatttccaacaacaatagactggattaagaaaatgtggcacatatacaccacggaatactatgcagccataaaaaatgatgagttcatgtcctttgtagggacatggatgaaactggaaaccatcattctcagcaaactatcgcaaggacaaaaaaccaaacaccgcgtgttctcactcataggtgggaattgaacaatgagaacacatggacacaggaaggggaacatcacacactggggactgttgtggggtggggggacgggggagggatagcattaggatatatacctaatgctaaatgacgagttaatgggtgcagcacaccaacatgtcacatgtatacatatgtaacaaacctgcacattgtgcacatgtaccctaaaacttaaagtaaaataataataaaataaaaaataaaaaaagtggctaacatacagtatcagggaagtgagagagcctagagcatggacatgcattgctatggctatgctttcagaaggaccgagctagttctgaccactgagatcttcattctcagaggaaattggagcttttgaaactcaggtaggggtttttaacaagagagtatttaacagaaggtgtactcaactcacagagagaacaccatcccatagcaaagtcaattgcaggaaaaccaaccagaaacacaaattgaaagcaaacaggttactttacctggtcactgagcaggggcaaggagcccccatctgctgagacaaagctgggctgctcacttctctcctgtgaactgatgactctggttggaaggctttctgtgccaacttgctactctgattcttcggatgtgctcagcccctcatctcagcaaccttcttgggtgtaggagaatgggtcagcgaagaagactgtggatatctaaaacgttatgacagttggattagtacagtcttcagtagagctgctagactcttgtacaatgagaaattatttagagaaaacagcccttgcacctgggctcatttactgcactgatgtgttcattcccccgcctcctttgctagtcttcgatacaatagagagctatgtattttctcaggaaatacgctccaagttatacttaccttacctcagaaataccaggaaagatttatatgaatgcatggatttccactgacagagtacacttggctttaagagaagttcaaagctattttgctaaccaatatctggatggactagaagtattttgataagagaatttcattcttcctcagcattttctgccaccattgaagtattttactgcttcccttctgcaaacaaaacagattgcatgtcacctctcctattaatatttggtggtgcaggactctcacggtgataaataaggactcaaggatgttccaccatccctcactgggcttctgcacagtaaactgtactcaggccactgtgcaaactcagcggctccgtggctgttcattttccacccactggtcctttgtcttttatctcctgggcattaagtcagatttgatggtatcagtgggctggtaaaggttgactgattaatgtctgtaaacctcaaagtgaccatcaaagcaatttattaaagaatggggactaaagtaaactctgtatatcagaaggaaacaattgcagcagaagagattattagttcttccctgcagaggattaaagacagttaattaggccaagtcatccagtggttaagcatttctatggtatatgtgtgtctagataacagaaagcacaaaagaaagaaaattccctcaccctcttgctagaaggtttgtatatccgtcttcacatgaaaccagccctcctctgcccactagagccagacaacagccctttgcttatctggacactcggattcagccaaactggctttgctggcaaaaatataactttctggattgagcagacattgaatattgacttagagatgggatgggagggttctttttactgttgttttcttcttgttgtattttctgtccccctctcccctttcctctctccctttcttccttcctgtctccctccctccctcccttccttccttccttccatcctttttcttcctttcttttcaacatattttcccaccctccctgacctgttgttaatataccattaacaaagagatcaattaaatttcagttgaagtcttggtgtggaaaacgcatgcttgacaagcttgaattttcagggattgtttatgttcctgatagtcaaaatgttactcaaagactggagtttgtggccaggactagctttggtggctcaagcaaggctcctgcttctggaagcaggacacaacacacactggacagaagcatgtcaagcatggcacagaggacagtgccagcatgtgcaccttctccttagtaccaaagcaaggggggtggactggaatgagcatgatgggtttagagtatatacgaaaatatcctggcatttccacctcattgtggcgggctagaagtgggatcaaaaggaccctctagttgactggaaaggttgaacaactgctacctggaaaagcccaaggatgagttctagctaaagtcaaggatgagcatcacattttctttacctatgtggacactaaaaagagttggccatctttcaagtagtgtgtgttggagatttagaggaagagaaaaaaaccccatctggatggaataattaagctgaggtttttttgggggggtctttgtttatagaaaacctcttttattttcagcaggaatttgtgctttcaatgcattcttctttctgatagtctcaactgccaggtgaaggctcttcctgtgtccttcctccagcacagtctgaaccagtacgcccatcactgtctggatgagccccccaaaactgcttgtggtttgggggtaaaagttttatgattactttatctccccaagtctgtctttagtctgtccttcctccttccagttatctttttttcttggcacagagaggatcaaaaatcaccggtacctaaataagacaattaatgaaaatagcccctccccctccttagcttctgaacttgtttctggggcccagcaagcccttcaagggaccatccttgttaaatgcacaggcaccatggcatcatcacccctggcttttccctaccgtcctgcagtacatcagatattttctcaatcacaaaacttttgatcgtcgataaaccctttccctctttgtaccttcagggtggcttctcagggccgctaatgcccacttaaatcaagagggatatcgtgtgtcaggtgattttaaagagtagattgaaggtgtgaatgcacaagtacgtattcatctgactttgagcaaatgttttagttgcttttaggatgagttatatctaggttgtctttctgtatgcgaggacctttgcacagagaacacagactcccaaggcatcactttgatgcaaaaagctttagtgccattttccgtcctctctgtatccagggtgaacgacaaagagggaagtaaaagattagagatcattccaaattcaggccaaacaaggcatctgctatccacagaaaaggtggagagactccataggttgttctgagagttgaagctggtgaaatggagacctttcacagcctaggcagcagagaggggccagcctcccagcatttctacagggaggtcccagcaagtgcaactgtagcagcacgggtgtgggtcagagccgcaggctgccccagagagatgaagccctgtgggaccagcttggtattgtccagctcatcaagaaaagtcaaatgtcaatggtttggtctcctctggtacatggaagctgactcaccagtgtttctaaatgcatagctaaatgccagttaaacttttgcatttcaaatacagcatgagcacctacattcaaatgctgtagtataaatccatatgtagcaatcaactttatacgtaagacctacaggcttcaactaattagaggatagcctgatgaccaaagaaagtaagttgttctacaaagcctatttggtttggtgtctcaggctccaaaggtgcagctgtgtcacctgctaaaatcaggcggacatcttggctctgcttccatctgtggtccaatctgactgtcgttcacatccttctccagccatctgctcacctcttgaggcaactggctgcccaagtaaaccagaaaaccagaggggggtcacataggagggctgggcagtggtcaggacagcaagggacatgggcaagaggcgcagggacgctgctgcgccaggagcgccagcttcttcctgaaatcatctgagggcaaagtgagcatctccgtctgctttcgaccttaacagtggcttgtttttaatttcttttagaagtgaaaactacagccctgaccccttggaaaggtttgtatatttttcagacagctgctgccttggtgggtgtggggtatgtaaaactcttcaccttcctcccagatgccttctttcctgagctaactccaggaagcagcgcagagggaaccctcccccaaccttcaaccatctccgtgtcaatttagattaaccccatcctcaaggacatccaatccttcctaggtagatcccacttgcagtagcctaacttctctttgctggtggcactaatgagcacctgtcagtgcccagaatagctccatctctgggctactctgcaccaggcctgcctctttcctcacacacggatgctctaatgcagcgatcttctcagaccttggccctgcatgctgcccttgcttgcaccattctttctatctctctaacttggagctggaagggaagtggcaaggggaggggaagatgggaggaagggggaggttcttgggtgagtcacttggctacgaataaaatgcatcttatttgaagctttcattcctgccagatgtttccgatggataattgacactcatcaccgttctctgggaccctaactgtcctggtaattagtctctttaggcctccgcagctctctaatgagatagaggcaataaaggcattcactgtggagtggaggcgtggctgaatgaagaatggaggcctcatctgcgtggcccatgtcactaggcagatgggctgagctgtagctctgaccagcactggctttgagagggccttgatcccagggtgctgtggtccacgcccacctggacctaaggtcttcatctcatctcatggaatccttccacatagcattcattcattcagtgtgggatggcctgcgggaagcagcccagtggcacgcctgcggttctcaccttttaacctgtacccaggtggagcaggccatgcagccacactctcttctctttattctctgaagatgcatctctgagatagtgggaagatagttgcatttgaagacagaagtcaagagacttgggaaagtcacttaagcttcctgaagttcagtttccacatggtagaaagggagataataattctcatctcctacatgagtgtcattaaggtgttgtgatagctttcccagtgcaagcgctctatctgaaatcctaactgacatggctttgcttctatgtagatagacactcagccacaggaattctcagtaagttgtattggatatagttagaaaaggggaggaaaggtatttggaagaggaaattgaggtaaggcagagggcaaggtatgaaaaaagtttttgttttattttttcttcaagtacaattttaagcaaaagtaaaacacaaagacaaataaatgtggatatgtcagcatgagtggcaatgccccctccttctttcaacaaacattggttgaatacctgccacgggccaatgagatacagactctgctcttaaggaacttactgcacagaggacagaggaggaaatacaaataagttaggcaaagagaattatgacacagggtggtaagtattttactagtgggatgtgtatggcactgagcaaggcagggaaggctgcctgcaagaggtgctgaaggctggaagaggagctggaatgaagaataagagtgatatgggtgagacatatttcggacggaggggagagtgtgtgagggtggggaaaaaagacccgcccctgtgtgctcacatgtggttatgtggcaaggggcaagggcaccaaactaggtgtggcaagaagagacaccaaggctgcagactgcaggcacatcacgaaatgtagtgctcggtccactgagaagctggacttggtgctagcctgttggcctcaaatcaatgaggatcatgatcgatttggggtagaaacatcaccttggaattcgcataaagaataaattccaggggtcaaggccacaggtggcaaggtccaattggtgaacatttttgggaattgaaagatgagatggtgcagagtatctcctttgggaggatgtctcatttgagagaatgcccctgcctcggggctacccctgtttccttctccttctgtccaacttggtccaggtctggtgtcctggatgtgctgctgaagagacaggttccgggggtggtgagcgcatgtacctgtggggtgggctgcgcagactggatatggtcacatagtgccagccactcaccagcctgagatggagatgatgatgatggagagcttcagaggggctgctcaggcttttcccagatatactacaagcaagagaatggctggcaggcacttggtggcctttttctgtcttccataggaagaattttctaacacaacaaacaggtgaggacacgactcgtctttacaagctctctgtggtgcttcccagcatggagcagatccacaaaagaactctgaggggcgtagcaaggagaccaaacacaggcacccagggagagcgcctggcatagccacagggccattgagatctgccacagggggtgtttgcccgctctcagtcgtctcccgagctgcagagtccccagcctggaaacaaggtttcagcattcccttacatggtaactacgccaggcccctgctgggctgaacacctggctgtggcattctcctccctggaggcttccactggcaggtcaggctgcaaggagggagttcagaagagaggagagaacacctcagtgcagggaagcggcacttgttttccatctcttacccagggcatcttcttagtcacagggagggagcgggagacgggaggtgggagtgtgcgggaattgaacaggaaatgggtttcaaagatgtgtgtggatgttcaggagagcacaagggatgaaagaggcagagcagtgtgctgacagctgtgtcccctgccgggagttaaggactccagtgtgcaggacacgtatggaattgtacggtgtgattcacgcatatgaagctatcttcatatgaatgtgaacactcacagtgttgaggcaaaacattcgacctggcttccataaaggcctgctgggccatatggactcagaaccacccttgtcgtctcagagtcctcagcctcgggcacagacaagggccttggttggaagaatcttggagttgcctagaggggaaggacttacgcagagcagagaaacatagtctctcacccttgaaggcatccggcggaggcttctctcctttgattccaaagaatgtgctctgtagatgacagagtgagcatctacaaagggggaacgtctggtgatggtttctgtggacacatagtagttagattctagaagacacaaccagttagtgaccgatcctaaatgacaagcatttctgggttgagatttaaatccgcaggagctttacaggagtgctccttggtcacctgtatcctagcacagatgcctttggttttgtgttttctccttaatgcagggtagagagaataagtatcccctgggcttctcagcatggggatctgcacctctgagaagttccggccttagggatactgtgaatcagacaccagggaaacatgaggttgatgacctattgcatttcaatctcatggctacctatttagccacgcccccaaattagggatttatcccaaaaggccaagacataaaatcatatgggcactgcctcctagccaggagttctagacttgatggaataatcccacatggaattgagaagcctgttttgattttgatttgttttagccagaaatgtatccaacgctgagcatccaagtcaggcaggcaggttctggctttgttccttgttccctaatccaggaagacatggacttagtgaggccaccagctttaaatacctctattaaattcaatgcaacagagtatgccagagcaggtccagtctgaggaggtggcctggttccttgagtagctaattcatctgggcatccaaacttatgtactctacagaaatcaaagctccactggtcatggggtttcttggccacaagggccgaggtagccagaaaacgtatgtttcagaacaatagggaagctgctggggaactgtactgccttgcagttctcctgcctcctgtgtttgtctccatctccatacactggggcaggttctgcatcccagtgtcctcattgatctccagttacatccacatgcacaggaaggcttcctgttcctttgtttgactcacctccatccatgtgggctggcttcggccttgcaggcatgtgatccttgagctgcatctgctcttaccccatccagatggggaagaggtcaagtgctccaggtggaacccaggtgccctgccctgagatagagtgattggcaggatggcctctgtgcccaaggaagcagaagcagcaggcagacacattgttttgtccaacaggttcttttctgagccacaggccaagcagctggagggtgggtgagtatttcaggcaggcagtgctcagaagtggatgggtgatgaggcactcagcacagtagtctgactttattaaagctctgtgtaggatattaatgaatctgccaccttcttcttgaatttgagcctgagccatggcctttgcatgttatgacacagtaaggaagaaggcccaggacactttaacctgagcctcatgttctctccttgcaggggaaggcttcccgttatctagtgtgtgtgtcttggggatgtgggccatagaacgttcacttctaatgctggggctggaacaccatgtgtttcacttagagggatgactcaccaggggcaaggccaaatgacagcagaccaggcaaccaccgggctttccttccattttctcccagaccactcacggcgagtgtgttctctccacaggtccaggcgccgtcagcgaggtgagcaacggcacgtcgaggagggcaggctgcgtctggctgctgcctcttctggtcttgcacctgcttctcaaattttgatgtgagtgccacttccccacccgggaaaggctgccgccaccaccaccaccaacacaacagcaatggcaacaccgacagcaaccaatcagatatatacaaatgaaattagaagaaacacagcctcatgggacagaaatttgagggaggggaacaaagaatactttggggggaaaaaagttttaaaaaagaaattgaaaattgccttgcagatatttaggtacaatggagttttcttttcccaaacgggaagaacacagcacacccggcttggacccactgcaagctgcatcgtgcaacctctttggtgccagtgtgggcaagggctcagcctctctgcccacagagtgcccccacgtggaacattctggagctggccatcccaaattcaatcagtccatagagacgaacagaatgagaccttccggcccaagcgtggcgctgcgggcactttggtagactgtgccaccacggcgtgtgttgtgaaacgtgaaataaaaagagcaagaaagaaaaaggaaacaaaataagaccgtctgacagcaacaacggtcccacaaacaagtcacaaaagataccgttaaacttttttttttttttatcattttactacatgaacatcatggataacaagggattctgattcattattaatttcattaattatattttctgatatgagtctagaacttactgcaaaaacaagacaaaactaaaaaaatacaactgagaagggtgaagagaagtatgtttgttaaacagtaaaaatgaatagtatacttcttaactaggtttacaactggtggaccacacaccaggcactaatcacctggtgaggatttggcatatccaccaaaaaatgcatccgatttaaccaacatctccaccagcgctacggactcctcccaattctgacatctcttgcagacaatactatgctctctacacactgtttagaaatggaaaggtgatctgcactgtatcttgggtttgttggctatgcttcctttgatgacatatattatacagtatatatatacatatattttttttgttagagttctagccattttatttctccgcagggtcctttctcagacattactgcatgctgtatatggcgttagctgtgtgttgatcttctaaaagatgatagagtttactggtaattgtgtaatcagctcctgcctttttattttcttgggttatttacatgtcagagacatttataaaaagtgaaaggataaaaaaaaaaaaaaacaactaataccgggcgcagcatctttccaggtgtggctctgcgctaggccaccccaggtggccccgctttctccattctgccctgtggcgttaacagacagcaagcagctgaacaagcagtaccgtcagtacccacttgctttagcccattatgggaatctctgatgcctttgtgaccactggagagtttaatcctcttggtttattttatttcccacctttgtgtgagtgtgtatgaaagagaagaaaatgcaatttttaggtaatcttttttttttttcccctcccctgaaagtctgggaacctgagagtcctcggggaggggtcctggatgtgatgagggaaagggggattgggggatccgggagggtggggttgtctctgacttgacattaaaaagtgttccatgtccctcttcacctggtgtggtacctcattctacagcggggcgggggcacagcctgcctggctcaggtttgaagaatgggggaggatgggctcttaaaccctcctgggatggagtggtggcaagtgctgagatgacaaacaggaaggacgtgggacctcctccatccccgcacagaggcaaggtgagggtgcgtctgatagggactgcattttcagtgccttcgggaggtcctggccagggctgccagtgtcctgcttgtgctcaaacatcttaccacacaagtgggcaaaggtcaagtctagtcagggagaagactttaggcccaattatttctgggaagcagcagaaagtcactgtcacggaaaacaagaaaacccccgagagccaaaagaaatctccccgcaaaaaaacaaaacagaaagccagcttgaaacattgtgtttagttttaaataatctcccatcaaccagtcctccaaacccaacctccaaacctcacctctagccacataagaggaactgagagacagaaatgggtccgagccaaaacactcaggaatgacggcacttgcatttccaagtcaccttcacctgagaggaaccaggaaggactgggatggagctgtgtcatttccagttgcttccggcaagactgaagaaagctattgacttcttcacctttctttgtgtccttctaccctttcacccctagccccacccatgtcccagatgccccaagtttttcgcagcagcaaggtctggaactacctggccaagcctcaggaatcttggctgcactggtgtttatccctgcctatgtccaggaaccatgaaagaggaggggctttgggtctccttagaatgaaagtgggtggctgggattgactaaccctcccatgcccagcacctcagcagacactggcctgagggtttgggtgcaaagcatggcttactggaatagagtggggaaaagataggtgagctccatattcctaaactggagcccagaaacacctctgaataccatgtgccaaggcccctgcaaagaggcagttctgaggcttggctgagagagaacacagtgtacacaacctttgtctgaatgggagctttatctttcacatctactatgtactagtaggtatctaccaatatctactagataaccaccagtagacattagtaatatctgctactgctaatcgtgcttcaaataacagtcttcaccctcccaggagagagagagtgctgagtcagaaccaacttggtaaggggcactgatgaggacttaattttacctatttgccaactcaatagttttcttgccttgtggatctttagagccctggttatgcaagagcacattctttgttgaaccagcttgaccgtgattgatgagttcaccagataggagccctccctatcctgcttcaagaggagcttactctcaccttctgctaagtgtgctgtgtgagcctcagtctgctgagtttcagtctttagaggaaaca

SEQ ID NO: 412 - DNA, 11923 bp, Homo sapiens
  source 1..11923: mol_type = genomic DNA
gacggagtctcactctggcgcccaggctggagtgcagtgacagctcactgcagcctccgactcccgggttcaagcaattctcctgccccagcctcccaagtagctgggattacaggcacacctgctaccatgtccggctaatgtttgtattttcagtatagatgggttccaccatgttggccaggctggtctcaaactcctgacctccgctgatctgcccgccttggcctcccaaagtgctgggattacaggtgtaagccactgcacccaggcatttctttcttctttttgtttttttagagacagggttttactattacccaggctggagtgcagtggcatgatcacagctgactgcagccacagcctctggggctcaagtgaacctcccacctcagcctcctgagtagctgagactacaggtgtgtgccaccacttccggctaatttttctattttcagtagagatgggatttcaccatgttggccgagctggtctcgaactcctgacctctggcgatcagcccaccttggcctcccaaagtgctgggattacaggcgtgaaccacctcacccggccatttttgttttgctatcatccaggctggagttgcagtggcacaatcacagctgattgctgccataacctctgggtctcaagtgaacctcccacctcagcctcctgagtagctgggactacaggtgtgcaccaccatgcctgggctaattttttttttttttttaattcttaaaaaccttttttagagatggcatctcactacattgcctaggctggtctcgaactcctaggctcaaacgatcctcctgcctcagacttccaaagtgctgggatgacaggtgtgggccaccaagcccggtctctatgtccatctttctgatttaaataaataaataaaagttaccaccctcatggctccaaggccaaagcttctagcttctgcaacaccaaagcgtgctgacaagccaggaggcactgactgctgaccgtgagtcgctgtcttcccctcgcttaaggggtctcccgggaaaatggcacaagccggtcccgggggccagggcccactcgacagcccaggaagcgcgggcaatggagctacccggcccagaagcgaaatcccgccccgggctcgcccccggcgccttggatctgggccccggcgctgcgccccccacctggactccgccgccggccccggcctccccacggccccgccggccctgcccctggagacctgagggcgccctcctcccggggaactgcgacccggaatcctggcctcgcccctgtcgcgctcgctgagtgcggggacggtgcccagcgctcggcacccagccccgaggccaggaccgaggaaggcgaccgggcggacccccaaccactcccgctgtctgcacgcgcagcagcagcgcccagctcaccccgccattggtgttccccgcgcctgcagcgcgccgccggaagtgcctggcctcacttccggtcagaggccacgcccccggaagcggcggtgcaggtacgaaaagcgcgcgcggggattccaggagtcgtggtgaccagggaggggagccgggccagcgggcggcaggagactaggggagctgagccatgggcttgggggagagcggggccgggagctcgaaggagaccagaagagcagggtcgggggctcgagggagacgaggagagcggggccgggggtttgggagagagacaaggagagcggggcggaggcttgggggagaccaggagtaaatcacaaaaatttactttggaaaccgtggcttctggcagaaacagatcagtgtcgggacaaagtacacgggcctggtgtgaaactaagccacaaacccatttaccctgtctgacctgcctccgccaccaggacccagtctcagtgaaatgggaaaggttcccttgtcctcctcgaagggcgtgcgatgaggatgtggctcacttcttcagtgccccgcttctcaagcctctaggggaacatacagacaggcaggctgaggggctcccaccccacggcagtgtctaggggtgaatgtttgcagctcctgaagccccagcaggcatgtgttagagggtgctctttcagtttagccttgtaggtggcttgtgttagtcagctgttagactccctgccttatcgcaaggacagagggctttctgtatccctaggtttcttgccttgatgtactggagcaatcagatcacacggcggcttggagagtgagtgcaaggttttatgagtggaattagccctcagcagatgggggagccagaaggcagttggagtgggaaggtgattttcccctggagtcgggctgctgagcagcctgggctctcctctgaccgcccctgccaaactcatggttccatcagttgatggcctgctggtgcctgttggtgtgctttccacgtcctcttgacgtccagcggcttgtgtctctgcccactataaaaaaccactggggtttttttataggcacaggacggggacgtggcgggctcgggaaatgcaacatttgggcaaaaaaacagaaatgcctgtcctcacccaggtccctgggcacaggcctgggtgtggagccctggccagagaccacgccctcctctacccagcacttccctgcccccttccttatcatctggtcccttttctcagacaccacaacttccaagaaggatcactggtcctgaaccctgtgtcttgtccaggtgtggaccccagaaaagttggtcctggctgggcgcagtggctcacgcctgtaatctcagcactttgggaggctgaggtgggtggatcgcttgagctcaggagttcgtgaccagcctgggcaacgtgacaaaaccccatctctactaaaaatacagaaattagctgggtgtggcggctcatgcctgtggtcccagctatgtgggatgctgaggcaggaggatggcttcagccagggaggcggaggttacagtgaaccgcgatcacgccactctcctccagcctgggcaacagagcaggatcttgtctcaaaataaataaaggaaagttggtcctggccctccagcatttctccagggtccttttttcagcagggacctggcggaggcatcgccctcagagtcctctggacctggacctgcacacctatgggagcaggaaggacccttgtgacttccagtggcccccctgggtgccaggtcccacagtagccacagcaggagcagagtgggtggggtataaactcctatcacaggagggaggactagccgggcctggctgggtggacctgtgtctacagccacacatttcctgggaatctggaagcctgctacagagaggccaggtcccactagactgaaagaagttcctgttaatccaaaggcctgacctgaggaccacaggataaactgcgtggttattttggtgccaatcaggcacggggactgttgttcctcactgtgtgcctataagcagggggttcctgggggtagacgcaggagcaagagcacgctctggaaaggtgatgttgtcctctgcacctgagtactgacttgtggagaaggaaggtagcgccggcctctgctctgcttgatcagccctgctgaccactgggttctgtttctaccccagaaaatcactggttcaatggcagttttccacctgccacaagggaagccacacgtggcagggctggggagttacagcatacccccccgccccccactgcctcccagagcacgtccccttcctcctggcccctggcacgtgcttcctccacgcacgtcatggctgactctgccctctcaccttcctttcagaacccagggaccatgggcgcctccaggctctataccctggtgctggtcctgcagcctcagcgagttctcctgggcatgaaaaagcgaggcttcggggccggccggtggaatggctttgggggcaaagtgcaagaaggagagaccatcgaggatggggctaggaggtaaggatggggcaggtctggccatagaaccggctttcccagggcacagggattcgggctgtagggccacacccttggtttcaccactaagagctaagtgacctggagcagggggttaagcgtgagcctcagtgtcttcatctcagaatgaagaacagtccgcagcccttcggactcttgtgaagataaaatgaggaaatgaactcgaaggacttagaacggtgcgcggtgtgcggtgcgtgctgagtgcgtgttagctgttgtggtgcggtggtgctgggggctgcagggcgtatctggaagcctctgtgcagcagcttgaattgaaccctcccagcaccctcactgttgccgaagggctcgtcagtcacttggttcctctgtctgttcagtggagctgatgatcgctttcatctcacactcgctgtgcacaaagcctcactgcatcctcaacacagccagcttcacctaggaaggaactgaagcccagagaggttgagccgtttacccaagatcacacagtcctccagacgcccctcaaccctcacagggtaaatgagatcatctgtgtaaacatcgctgcacagacgttagcccccgttcgtgtttttgttctgagaaaggtaggccagcttgcctggagaggagaactacagagtaaagagggtcctggcacggaggaaagccaggacgctgcagcctagtggctttccaattttttcatcacaacctgcagtaagaaatacgttttgtactctgatagagtgtacacactcaggtgtgcaggtacagctaaagtaagttgcagtagccgcccttattacataaaagggggctctacttttccgattcatttctctttttttctccagaggtgggatctcacccatggcacactcttggctcactgcagcctcaaactcttgggctcaaacgatcctcctgcctcagcctcacgaacagctgggaccacaggcacatgccaccacgctcagttcgttttttaattctttgtagagatggtgtctcattaactcccaggctcaagcgatcctccctcccgggcctcccagagtgctgagattgcaggtgtgggccactggcttgacccttttttttttttcaattgcaatccactaagccgatttcccggggtacatgggtcccaaccctcagtttggagagccctgtgtgtgcttcccctccaaggcttgggaccccagaccgcagccacacggacacgttcgatcagtcactgtggcaggtgccagtgcgacaggctctgtgctgggggccgcagctggggaggaggaccactgggtgtgagtcgggcatacagcgtgtccctgccaggagtgtgtgcagagcgaccacagcacaggaaacaggaaaggtggccccgggggttctctgcccagccctttgtctttgatctgctaagactgcccatcagctcatggatttctgtagcgctgctctgtgtggggcctggggacatgaggaggaacaggtcagtccctgcctctgtggagctctcgtgtcatctggctgccgggttcaggagacctgcagaaggaggtctggtccatacctcgtggccaggggcctccaggagaaaggaagggagaataactgggcaccaggaaaatgctctgagggcctgacgttggctgggagagtgtggaaggagggaggaaggagacatttgcagaagcacagagggctggaggagcgccagctgtgcagagaagtggtgggtgtgagtggagcaggcagcggtgctgaggaggctggatggaggaactccaggtggctggatttccgcttctcgtcctgctggtgacaagcaaagcacaggccccctcggcagccctgctttattttcttctgaactttgtcacggtcgaaggaactttcctcctaccctctgtaaatattacacaaacagagggaccatcactccagaccctcaaagctgaatacagtggtggcttgctgtcagaccagggtttgagggggggaactgaggcacagagccggaagcctgtgacttccatcctcgggtgtaacctggagacgggggtttcaccatgttggccaggctggtcttgaacacctgacctcacgggatccacccgcctcggcttcccaaagtgctgtgattacaggcgtgagccaccgtgcccagccgagaccctgtcttaaagaaagaaagaaaaaaatccttcgttggggagcatctgcaagcatgaggaatgggggacactggagccagacaggctggtgcttaggggtcccagggccccgggaacccagcagcaaacagcctcgccctcaggggatgacgtaccatcagccacaggccaccagcacggccctgggcttcagtacctgcgagtctgaatggatttgctcctggggcaaccccaggcccgtgctgctcaggagcgggaggcagggaggagcgtcggcagcccggtctctggggaggctggttcctgctttatccacgcaatacccagtcctattctatcaggaggaccccaagatgggccctaactcccaggccaagagccggtttaggcaccctccccgcttgcctgcagggggcaggcctgagcgcctaaccccagtccagagggctggactcagaccctcctctgtggggcaggggacaggcacgtagggagtactgaattgtgggggtgtgcagatttgggcttcaggcgcacagtgtgagccgacctttctagacagcatccctggtccccaaagactagcgaggccggggacacaggagcagcgatgggaagcaggcccgccggaacctccgactcccacctccccacgccacggacgctgcaccaccctgtgtttttgtttcatgtatttctcaccctgttccccgtgttccgcctggggaaccgagtgccatggacagagcagacacttgggcagaactgaacagcgtcatcttcgcctgcctggcgctccctgcctgggaaatggagcttcagctctgtctcccggcggattcttgatgcttcctacgctgccatgtgctagggaagattaactaaaatcagtcacaatatcccactgggaggtgacgctttttaagacgagcaacagccggccgccaagaggcgggtgaggccccactgagcacttctattgcatctaactggggagccatttatacccaagtagaagcacacgttcactttgtagctcaagcccaactttaattagccatctgtatgaataaatgctgattccaggtccgtttcctctccagtccctgcagtttaagctgaggaggcatcgcttaaatcagaccatttagaccaggcatggtggctcacacctgaaatcccagcactttgggaggccaaagcagaaggatcgcttgagcccaggagttcaggaccagcctgggcaacatagcaagaccctgtctctacagaaaaacacacacacagaaaaattagccgggcatggtaagaggaggagactgaggtgcccagcggctgcagcccgtgcatccccagggtcccagcacagagtgggtgttcagaagtgtctgctgagggactgagcaagaacccgactgagcacagcaagcaaacgctcagaacgggaggtcagcagcaccgctgtgcccaacacgggtttccaccataacccgaagttggaacgttttattcttccataccaaacaggagttgagaaggcggctgggttccttgaggtgtggaatgtcatgcactcctcctttcttgcgtggaaagcccgaggtataaagtgtgtatgatgtttgcttttttttttttttttttttttaagacagggtctagctcggttgcccaggctggagtgcagtggagtaatcccagctcactgcagcctccaactcctgggctcaagcattcctcccatctcagtctcctgaggagctgggactacaggcgagtgccaccatgcccagctaatttctgtcctttttgtagaaacagggttttgccatattgcccaagctggtctcaaactccggagctcaagcaatcaatcctcccaccttggcctccaaaaatgctgggattacaggcatgagccaccctgcacccaacctgtttgcatttttattttttaactttaagctattaagggttaatgtttgcatttcttaagggaaaaacagaggagaaagagccaaaggaaaaacactgaaatggtagcattcctgggtgatgagtttatggcgttttgtttcctggttgtctataacaaatatgtaatttttaaattagcaacagcgttagactacttcggggaaacctggctctgtgtgccacgaagcagggaagggcttgttcccaggcgcagcagcacttgggcatcccgtggtgaagtcagccccttacacctcctccaggcacagctgtggggagcatgtcccgagaaggcgcaggaagaggcccaggccacgtgtcccgtgtggtcagcctggggaccagagttaaaaccagagctcctccttcaggaaacagatcatagaagcctgtggtttcatcctgtgttctcagagaagaggcaccaggctggaaagacatttctttgggcagacaggcccagagtatagggcccaggttcccagagcaagcgtcccagggccccggcggtcgtaactaccgctgcatgggctctgatgctcagccgcggaaaagcaagtaaccgggaatgaaggaagtggggtcagtcccaaccctgccacgtgcgggtctcgagacggtggacaagtggctggactccactgggcctgggctgtcactggtacacagagggcactgggctagaactgcgttcctcccaccagaggctccacaccatctccgggcccctccccagagcctctcaaccaaaatcagtgtcttcaaagttcaagttgattctgaagctcagccaggtcgggaccagataatgcattctaggggacatcctcctgggtctcccatccaccctggtggctccctgggctgtgtgtagatgcccagctcctcctccctgccatcgtgtgggcatggcaccatgccctgacggcctccctcccctgcccacctctgcccgcagggagctgcaggaggagagcggtctgacagtggacgccctgcacaaggtgggccagatcgtgtttgagttcgtgggcgagcctgagctcatggacgtgcatgtcttctgcacagacagcatccaggggacccccgtggagagcgacggtgagtctcacagggcctgctccccctccccactatgcgggtcccatctcctggctgggagaaaggccatccgcccaaaccatctctgagtgccagggaccgggcagcctgcgtccccctccaccccacagtgccagcgtggggcccatgagccgtggtctctgcaccgaggctccagtagcgtacctgcccctgctctgcgcccaccctaaaatgagaaacacggtaatgaggatgaaatataaacgatcgtcaggttcctcacgatcactcagtgaactcctcagagagtcagtgtacgtttgggctggccagacgcagtggctcacccctgtaatcccagcactgtggactgtgggaggccgaggcaggaggatcgttgagcccaggagttcaagaccagtctgggcaacacagtgagaccccatctctacaaaaaaacatggttttgttgttgttgctgttgttgttttgagacgaagtctcgctctgtcgcccaggctggagggcaatggcgcaatctcggctcactgcaagctccacctcccaggttcacaccattctcctgcctcagcctcccaagtagctgggactacaggcgcccgccaccacgcccggctaatttttttgtatttttagtagagacggggtttcaccgtgttagccaggatggtctcgatctcctgacctcgtgatcctcccgcctcggcctcccaaagtgctgggattacaggcgtgagccaccgcgcccggccaaaaaaaacatgttttttaagcatgaagtttgggttgcacctcagtgcctcctcttcccccattggtacagaaatgcgcccatgctggttccagctggatcagatccccttcaaggacatgtggcccgacgacagctactggtttccactcctgcttcagaagaagaaattccacgggtacttcaagttccagggtcaggacaccatcctggactacacactccgcgaggtggacacggtctagcgggagcccagggcagcccctgggcaggagacgtggctgctgaacagccgcaaaccatcttcacctgggggcattgagtggcgcagagccgggtttcatctggaattaactggatggaagggaaaataaagctatctagcggtggttttttttttttttttttggagatggagtctctctctgttgcccaggctggagtgcaatggcacgatctcggctcacgtcaacctccgcctcccaggttcaagcgatcctcccatctcagcctcccgaagaggtgggattacaggcgcacattgccacacccaactaatatttgtctgtttagtagagatggggtttcaccatgttgaccaggctggtcttgaactcctgacctcaggtgatccacctgcctcagcctcccaaagtgctgggattccaggcgtgagccactgcacccggccggtctctaacctttcaaacgttcttctccagacaccagcacagcctgccaggtcccgtccacaggaagctaccagatgtgctgggcttcagcccgcactgctgcacagaggtgggagaggatggagactctgtccccgaggtgggcagctggcccagggcagagacacacatgctcagtgccacaagctggggatgtgtcctcttaaaacccccctgcacagtgtgggaagctgaggctcggccaagggctctgggctaaaacccaggttgaacgcctcataggctagtcccctcccctgcccaactttcatacacgtttaataacagttgttcacacatgtttattgataaaccgtccaaaatgtaggtcatgtgtaaacaattccagttgttgggtatattgggtattgatccctgcagcctcctaaagtgctttggacatgaactgacccgcaaagcaagggcaaaggcctcagatgcacagagctgccctgacatcccttggctcggagtccctgtgccccatgtcagagccctaaacctgtctcccctgcctgcactgtgtccggcagacaaagggcagctgtctgcacggtgaccccgagtacccaggacacggaccacgaggacccaatgaaaatgtcccctttcaccatgatcggcagcccccttcccacagccccgccagcccacaacccccctcccacggccccgccagccgtcctcacagggcaggcggcatctggcatctccaccagcatcacacgcagctgtccctgccagctaggcaaggccgtaatgaccggcacaagcttgggcttgggccgtgggcagcaggagggctggagaggcatggggggaaccccgctctccctccggcatggggcctccacctgcagcagtaagcagcctctcagcccctgagcctggggacctgcccgggcagcacagggccagggccaagaagtatttgtgagaaggaaggtggcctccgccacccctgcctagcaggcctctttctgctgccctttagaaggcactgggtggcagaggaggaaggggagggaggtgttccaaagccagtgcccacccctccacagagccaaccccagggcacacaggaagcagccaccacacgtgggagacaggctgccctcgtcaccgctgccctccagcccccccttcaccctgccctcc

SEQ ID NO: 413 - DNA, 80662 bp, Homo sapiens
  source 1..80662: mol_type = genomic DNA
tgcggccttctcatgacctttccttcccttccgctccagccgggaacgtgggagcacaggtacgcagctgtgcaaggccttggtgctggagcagctgacccctgccctgcacagcaccaacttctcctgtgtgctcgtggaccctgaacaggttgtccagcgtcacgtcgtcctggcccagctctgggtgaggagcccaaggagaggcctccaggaacaggaggagctctgcttccatatgtggggaggaaagggtgggctctgccagagcagcctgtgaactaatgcccagcattcctcaaggtcagccagacaaaaaggaacttaggtcttgggcagaggaggtgtagcctggggcaaagtgatgagatgtccctcctttccttggcctgatccttgtctgccttcacttccctaggctgggctgagggcaaccttgccccccacccaagaagccctgccctccagccacagcagtccacagcagcagggttaagactcagcacagggccagcagcagcacaaccttgaccagagcttgggtcctacctgtctacctggagtgaacagtccctgactgcctgtaggctgcgtggatgcgcaacacaccccctccttctctgctttgggtcccttctctcaccaaattcaaactccattcccacctacctagaaaatcacagcctccttataatgcctcctcctcctgccattctctctccacctatccattagccttcctaacgtcctactcctcacactgctctactgctcagaaaccaccaagactgttgatgccttagccttgcactccagggccctacctgcatttcccacatgactttctggaagcctcccaactattcttgcttttcccagacagctcccactcccatgtctctgctcatttagtcccgtcttcctcaccgccccagcaggggaacgctcaagcctggttgaaatgctgcctcttcagtgaagtcatcctctttcagctctggccgcattctgcagacttcctatcttcgtgctgtatgttttttttttcccccttcactctaatggactgttccagggaagggatgggggcagcagctgcttcggatccacactgtatctgtgtcatccccacatgggtcctcataaaggattattcaatggaggcatcctgacatctgttcatttaggcttcagttccactcccaggaactttgcctgtcccacgagggagtatgggagagagggactgccacacagaagctgaagacaacacctgcttcaggggaacacaggcgcttgaaaaagaaaagagagaacagcccataatgctccccgggagcagaggccactaatggagagtgggaagagcctggaaagatgtggcctcaggaaaagggatgagagaaaggaggtggtatggaagactcagcaggaacaaggtaggcttcaaagagcctatattcctctttttcccacaccgatcaagtcaactcagtactcacgggagaaaaatagactttatttacaagtaataacatttagaaaagatccatccccggcccttaaaaaccttcccatcactccaaatcccaccccagtgcaagtctggggaaggtagggtgtgagctgctgctgaaggctgtcccccaaccccactcctgagacatagggcccatccgtcctgggaaagagcatcctctggcaggtgctcccaccaggtcagacccagtcctggacttcaagagtgagggcccctgctgggcccagccaccaggacagcaggaaccagggcctactcctcttatggtcccttctagatccagaggctaagaggaagactggccaggcccaaggacccagccatcaaaaccagcctcaaatctggttgtgatggagaagtgactttgctttaagaaaaaaggaggcaaggtagggagagcgcccacactgtccatgctccaggccccctgggccagctccgagaaggcgccagtgaaggaccagggaccaggccagggtgcgggcaggcatcactgtctctaggggtttggctactgttggcctgggagctgagagaaggcactgagagggacagtaggcggaggaccaggtgaggtcagcatcggggacacaggtggggccactcactggtactggccctttagtgctttgcctgaaagagacacagtcacatggccagatgagaacttgcgatactagcctgcacccactggctgggaagatctcttcctgctcccacgcccctgtctggatcccctcccttgtgagccccagggttatcagttgctggctgtgcctgagcagctctgggtgctctccatgagaatggggccatctgtcttctctccttggagaggagctaccaggacagggacacctcttaccccacaccctccagcagcctggcgtggccccatcttggatgctacttggtggggcggtctggggggtgcccatgctctcatcgggtttccctcccccatcctgccagtgcctctaccttgcccttggctcgaggggtggcaccaatggcggcagcagtggcggcgctggctgtggtggtggcaatgcgcggagaacggcgggttccactgcgagtgttgggggaagccttggacagggccttctttgaggctccccgccgcagaaggctgttccctagcttcttgggtgtgttgaggatgctgaaggccatcgactggcgccggtcagcctgcaaggaagggctgtcagaccgggagacccaatgctgccttcccaggccagcgtgctgtgccacgctctatcagcaaggtcccgccagggcgtcgcttcatcccccttcagccccagcctcacctgtttagtagaagctggagctgctttcttctgggcctcagtagtgctctgtttgcgcccttcatgtcggtctcggggagtcatggggcgtgggaaacagctggtggccttcttagactatggagaagaggacagttaggcagacagtagcaagaggagtcacatctgaagccaggtgtcttgtcctctcagagctgagtggaccttgtaagtcaacgtgcaacctgctccccttcccaactctgggccagatccttcccttcccaacagttcccatccatgggtcaggcccttggagagagggaaagagagggggaagtgagggaaggagagagaaggctccctttagtccttggtgagctgggcctgacctgagcacagtgctggagtaacacccaggagccaccgcgcctacctcaggagttccagggccctggtggggctctagggagacccgtttgcgctgctgccgggtggtgatgccagtgccctcggctatctggattggctgcatgctggctcggcgcagggtctcttgggggtctccagttttcatctcctcatctgtgatggtgcccaggctcagggaaggctgcatgggtggaagaggtggtcagtggaccatagctgtatggagatggaggaggacctggggctgtcccagaactctacactcgcccgacacttatggtcgggacccttcctgcctcacgaggtagaaagacacaaggcctcctttcctgttctgctttctacctaagccctgggcaaatggccacaagcagtgcagtcctgaccagattcctctctgagctcctgcctaccccaagggacttcacccctgagtgccctcccagctgtctgttccacctggaaacatgagaaggtcaccctccccctcctcggccagtcagtgatccagggccctagtgctcaggctagatcagcaggtgggattccaagggagggcagggatgggaggccctgcacagtgaccccaggcctcaccctggactccaggggatagcaggtcttcagatgtggggggcacactcgattgcgctgctgcagctctgcaatgcggttccagtcatccagctgctcaggctcatcctggcaagtgcccatgtagaagctgttccttcctgtggaaggcagggaagtgggaacaaatgagcctggagtcggcaggtcacctcctggccctggcatcttgccagcctttgctgccacctaccccataaacttgaagcccagcacaccagtctgattcagtgccgcaggtgcaggagtacggcacacagactatttctatcctaggggcttgctcaccaccttctccctggagagggcagaagaggtcacacgcagagactgctactacatcttactcacctgccaaggcttggtggccaacacccagaggaacaaattaaggaccgggaattaattcccaggggctccctggtgcccaaaggacaagagcttccaagaagagtctggccagcctggcctttccagcagcccatcaccgcctgagaagggcatggaggactccccacagctaagtgtcacaattgtgctgggaatcccgggcccttaactctggctaagagtgcccccaacacagccagcccctagatgggcaggtaaggaaggccctgaggctgcaggaaggaggggcaggtggagctggatggtagcaaggaggccagccttggatttttaaaaagctttcctcttttccctgtgccacgatccaccttccagtctaattttggggtatagtaagtccctgtagtcccctcacctggaggggccccactggacaccccggcctgggaacgacgagcagaactgcgagtggtggggcggtagccaggcaagctgagcagggctgagttgccataatcgggagaacccaggcgagctagagactgagtagaggaggtggctcgcaggctagcctgggaagcaggagcagaccgcgtgctgtagaacgatgagttggcgctgtctggctcttccacatctagcttctggaagacagagtgaatctgttgcagtgtacagtccctggcactgtacagaagcttcccattcccttccgaagccctcagatcccacggcacatccatgtattcccaactgctttgcaaaggtccttaaagtgtgtgtctgcaagaaatgggccttgtcgacagaagccctcacaaggtggtgctgatgttgtcaagactcttctacgcatttttttcatggagtctattcataatgctttgaggtagggaatgcagagtgtttatcggcccattttggagatgaagtgcaaagaaataaagtgactagccccaaatcacactgctaggaagtatcagagctggggctaggccccatgtctcctgactagtcaggctcatcccacagcctctgctgtccctcagtccaaacttccagggcccttaccatgttccagaacttccccaacttcttggtagcagggggcaccctaaacacacaggtcccccctgctgtaccaggggcccctctcccctcctcccaaacctccccttcaagatgtggaaacaaaggcaagggcctgtagcctgtcaggcagtccactgggcagcaacaatgcctctcagctgcatggggcatgctgggaggcacaggatgggctgcagcttcgccacgttctctcccttcaccctgcacaggctcagtgctacgcatggagagaatgctagccttagtcaggaggcagggatctaatcctagccctgcctttttcttcagaagtgcccttaaccaagtcactgccctttttaagacctctcagctttcccactgtaacatggactggctgctcatccctccctgctcctgactgagtgcccagtgcaaagatgcccttgagaggaagtgggaattgctgccctgcagcccctgtcccagcagcctgaccttggtcatggtgatgttgatgatctgcgtggtgcgccgacgagcggagcgggtcttacgacccgagtccaggaagacgtctcccagggagtccaggctgctctccaggggggcctgactccgagcagggatgggagtgaagtagagactctccagggattctaccttggggggcaggcgctgggagataggtgaggctggttctccagggacgctggtgccgtctggctgggtacgaggcagcttgctatggaaaggaaacctgctgaggtacagtccttcacgctagaaggcattttgtccagccctttttgaaagtgaccatttcccatccttactacaagcagatgaggtcaagcagcccatctctctgatttttcagaggtaccaaggaaagcacttgacctgggccttcctttcagtccactcccctggcttctcctaatagctcctcatagtggcaatgcccagacccagatgtcccatccccaccagatgcccatggctgcttcacagcaaacacgtcccaatctaagcccacttctctgttcttcctcctgcatctcccatttcagtgaataggaacgccccccactcaggcccccaagccatgaacgtgggcataatccaatgtcgtcctgcttggcgagcccaatcaccaagcttcctgaacagctcctaaccacaccccactccatgctcatgtcctttccctggtctgcttcatctcctctcacctagactcatcatggcactgacagaggaagatgagtggtgacaagccaagaactcaggccaggctgcccagggtcaaaccccagctctaccactggggaaccttgggcaagtgactgcccctctatgccccagattcatctgttaaaggagacagaataaacctacctcagagggttgttgggggacaaatcaggtataattgtcatgagtgctttatgtctagcacaaaataagtaaatgtaagtgtttaataaaaacatttttccagtcttaacttctatactagctattagaataatctttttaagatgcaaattaaccatgtactcttcagtttcaaattcttccaaggttcctttttttttctcctaaacctttcaattacagccaccaaggtttcctcaatgcctttaggatcaagtcttaatagtcggtctccaatgggccttcctggcctcacatctcagcttagtcaggctctttcacagcctctgttcacactgctcttctcgtcaacctggcacacacacctatggatgctttcaagactcagcaggagcgatagcttccacgaagcctttcttgaccacttgctttttattccaactgtgccctaaatagatatctggtataatacccgtttttcgttattcttctctaagaataaatttagatcacatcttatttatctcactaggatacagcctgataaacagcaggcactccataaacagacatagggaggaaggctgcctcctgacctggtgatactgagtggggtcccctcctcgcagctcagatccaggctgtcaatactcaagtccagctggggcttagcctggggctcacggctctttaaagcatcagttgccacctggaatttgcccaggtctcgaagctgctggtctgcatgggcaacctgagaaggagagggccagggggagagtgaagaaaagcctaaggcagcagtggcctaggaggagagggcacaggggtccagtggaataggagtgaggtgagtctgccagccaaattcttacctgtgcctccaggctgcgcacctgggcagtaaggtggcggcaggtctgttcagcctccttggtcttcagcccagcctgctgtagctcatggcccagccgttcagcttcagctcgcagctctttgttttccttctgcagctgctccaggctccgcagctgctcctgcagctcttggttctgctgcttcttggcatcataatgtgttttggctttctccatctgtgggcagagagggtgggtgggtggggtagaggttgaagggcaggaggaaggtggcatgggctggggctgggctccttacctgcagcttatagtgctcagctgcctgctccttctggctcaactgggcttgcagttcattcagctgggcctggaggcgctgggcctcctgctggctctcgcctccctgagcctggacagcctgagaagaaaggccactcaggaaagctggtctggccgctctacccaagtccgcttatctgcaccagccactggggctccacaggtgcttcagactcctgcactttcttaggaagcggaagaaaaccacaccaccccaaatactctctgcccgactacagtctactaaacctgaagcccacatgcccttcagtccacatccgtagtggcctttccctgaccagctcctgccctatctttgccttctttgagaccagacacaaagtgtcacaccctctttgcatgcacaatctcccgtaggaggaagggaaccaatcctcagggaacacccaggtgcagagccttactctaaggcacttggcatgtgagctctcttaggacaggggaacttgtttctcctcaaagccactctgagaagtcacttcaccctcttttcagaggaggaaactgagttcagagatttaagcaaattgaccagagtaacagtgactaaatggcagagtaagatttggtccacctaactccaaaagcccatgggggcttatttatgatgcccacactgcctcctgtccagaccataactccttaagagcagggcctgattctctgtccatctgcaaggccaacaagtgctttgctgtagatagaagcatcccccctttgcctctcctaacataggacaggccccacaaggagtagaataaacatttgtttattgcaatcaagacatgctgtggcaccatggtatgaaggtgagcaggagaaatgaagctctgagctcccaacaactcctaggagccaccagggctttagtgagtcccaatgccactggtgcccaattcctttgcccctgactgaaggctgtgaagcctagaactgcaaaaagcaagtattaaaccaaagaaggtgacacagttgaaagcattaagaatgttattaaactgcactgtaatattcaacactggtgacactctcgttctttccctgcccagactatctagacttacattgtccaaaagaactttatgcaatggtggaatgttctgtatctgcgctgtccaatacagcagccactaaccacatgtagctactgaacaggggcacagtgtagctagtgtgattgaagaactggatttactttaataaatttcaataaccacacgtgactagtagctgctgaagtggacagtgacagttgagagatgggaaccaccctggttgtctctcgagagctcccagaagacacatgcaggggcttctaagccacaggcttcctaggagggctacctggaatgcagggtgcccctcttctgccccgacaccccccacggccccagagcttagagaatagcttccctcccttgtccagaggccagacccattcccccagctgccccaccttcagcttctgctgctgcaccttgctggcttggtcagagtcagccagtttcttactcagttcttccacctggggagggaagaggaggacagaagactcaggaggacttcccctggatgttcatcctggatgtccacccatcatggggtttcccagaccaggatccccagtgttcctagaataaactcaggccctttctctggcctccaattacggaacagcctgctgcccaggctgcttggcagggcctgaatgaggcaacctaacacatagatgttgccagggccaactgttcttgcgtctaccctgagcctgcagagacagaggcctgcccaacccccgtcacctccaaaatcaggagaattgactctggggagccgacacctcaccaccaccttgctgccgccacactctgcagccgcaaccttcccaggacctagtctgtaattctagtagacatactcaatgaattcccatgcctccctcccagaaactgccaaagcccaagcccacagatgctcagacctcttcccaacatccacaggccgttagggctggtgctagcagcatggctgctgtggttagcattggggaacagattgctggaagacaagagcaggggcagcacatgtactccaaagcccaccccactcctacaaagaggaagagcacagggagtaggggaaaagagagaacataacagccccatgcacccttggctgctccaagcattctgggagttcaagcatgaccaggcagcacaggggagaggcaagggctccattgctaactgtttgctattcactttgattgtcccccactatcacaggctccttagaggagggcccaatttttcagcagccctggggtggctgggtaggagagtgatggagaaagggtgctctatagcctcgatgtctcagaaacaccagctctatagcctcgatgtctcaggcaacacagagatgattcccatgagaaagaggcagccagaccatgtgacccccactcccccgcccccatctggtatagacccctcctgctccttcaccctcggtcttcctgctacagacatctctatgctgtgctcggggttagagccccagaaagtgatgggcaagtgtcctaagcccacaatcctccctaacctgtgggggctgcctcgcatatcaccttcaaggcttccataaagctgtactctgggaaaaagggacaccatgttaaacaaggccgacacggtaattctgctgttcctcttagtcgggtatccttaactagacacagtacttgggaagttctcgaatcccaaggattgtgtctgtcattggttcagggtgggaaagatgaagccagtgctaccccttgtccctgataggcaaatgagagaaggtgcagaagggtggagaggccgacctgggatgggtgggatgaggcctgagagagcccagcacaccacactcctgggcagcctgggcctggattccatggcttgaccctgcccccttcacaaacagttcacaacaggagctggcggaggcaagctgcagccgggctcatgcaccaagactggtcaccgtttaagcagccagcatttagcgaggacctcaggcattacctgcttagtttgctctctctgaaatacctctagctgctccacctgtacatgggggaggagcaacagagacagagtgagatgaggccaaagaagcaccagccctgctgccaggctgacctcactgaggctctgatactttcccctaaggagctagattgacagtaagtttaaaaatgccagttaggctgattctaatccccagtggctcctgaggcatccagtgcaggtgtgcctctgaacaggctggtggtcatcacaacttgactctctagtgacagagccttcaggggaggggaggccactgacattttctttaggatgacaggggcaacagacttgaactccaccagccacctctccttttctgccacccagtgaatgaggaaaggcaagacactccagtgtaggagctagaggccctggacacagaggatcgatgtccccgcgctctcagctcctgatctttgggagggtggttgggctgagtaccttacctgggcagtgagtttctgcctctcttcctggaaccgctgcctctcctccaggaccttgaccttggcaccctcatacttggcagtcatcacctccagctcccgggcagtgctctgtgcttctcgctgcacctcagccagacgggtctcagcatcagcacgtacggctgccaactcttggacatacttctcccgggcctggtccaactccacttccagaaactgccggccaaggttggcccgctcacccagcccccggttctcctctgccagcaggccatgcgccttcttcagcatgctcagctgctctgcatagctggccttctctgcccgcagctgctgagctgttcgctcctgctctgccaccttctgccgcagaggaatcagctccccaagctcccgctgggcccgcagcagctctgcccgcagtcccccagcggcctgcttgctctgctccagctcctcacggtggcgtttctcggcagcggcctgctcggcctgcagctgctggcagaggtgcttagctggcagcagctcactcaccagggcctgtgtgctggtgtgctcgagctgcagggtggagagggcctgctctttctggaagaacttctcctgccacgccttcaattcttggcccagctcctccgcacgctcagcctgtgaggtcagctcctgccgcaggttctctgaagccacccgctgtttctcagcctcctcccggaggctctgcacctcctcccgcagagcagagctgcgttctgcagctctggcactgttgctggctgtctctgcctgcagcaggcgcagcctctcctccagcttctggctcttctctgactcggccatcaccagccgcttcaactccttgctctccccctccttctccaggacctggcgattcaggatggacacctcctcctccaagctgctgatgaggctatttttcctctcagcctcttgccggccccgggccacctgggccttccactcatcttcagccttgctgtggtcttgtaccttggtgcggaaggcagccaactcccgttgggccgaggctaaggcactctgactgtgccctagctcctgggccttctcctctaactggccctgcagagtctccagagcactgtcccgctcagcccgggaggcccgctcagcctcgaggctgcgttccaggctgtcagcctgctcctgctgcttctggcattgctgttccagcttgctcacctctgcccgcagtgcctccagcttggggcctgttggctctgtcctgccagcagcctcagattgggctcctgagccagatgcgtgctccttttctttcttagccagctgttccttcagttgcttcacggtttgccgaagttcctccagctcttttatctgggctgcctccagaccacgaagcttggccaactcctggtccttgccttccttttccgtcagggcatgagccagtgcctcttgcagggtagcgaactccacacgctgctcgttgagggcgttctgcagccgcatctcaagctctgctctggccgccttctccagggcaaggtcagcctgggcacggccccgctcctgggtcagccgcgccacctccctttcctgctgcccacgctcctcctgctgctgcccctggctctccatcagcgcggcccgcagccgttccagctcattgcccatctgctctgcctcccgctccatagcctgcagcgctgcctgtgtgctgcagaactggcgtccctgttgctcttccagccactcgggctgtctgtctcctgccctcgcaggctccttgactaactcccgggaggctgtttcctgctgctcacctgccttgcgcaccaaggtctccaagcgggccacctctttgctggtggcagccatcttttcctgcagagtggagaggtcatctgcaagcttctgggccctgacttccttctcttggacctgctggagtgctctggccaggttggcatggagctcagctagttcgttctgctgccggcttatctggagctcgctgtgggattctatgcctgccaccttctcctttgcctcctgcagctcctggcgggccttctcacattcctccttcaaagtcatcagctgttcctggaacatggcgccatactgtgcctcctcttgctggctatcctcataccgctcacgccaggcagctacttctttgacgagctgctcacactcactctcagctgtgtgctgggcagccatggcctctgccagctcccgccgcaggacttcagtctcagcctgatgggcctccccaagctgctgtaatcgagcctccagccccttgcgcccagccctctcttcttccagctcctttcgttcccgcttatgctgctccaccaggcttcgggtctctgccttcagctcagagatacaacgctgctgctcttccagggcatctgcagccctgcgcttctcctcttcaaggctgcccttggtgaccttcaaggactctttgagggcctggagctgctcctggagctggtccttctcctgggccaccctttctttctcagttgctttttgctgctcagaccgcagctgcaactctagctctgcaacctgggcctgggcctcatgctgttcctggcgggctgtctcaacacaggcctggagttcctccaccttccggctcagctctgccttctcccgctgggcctgtgtcactgaggtctgggcactgtcccgggcttcattagccacctgaagttgctgctgcagaatctccagcttggcagccttctccttctccagtgcctccagctgcttgagagccgcatcccgctcccttaaggaggcctctcgctcctctgcagcagtggccagttgctgggcatggtcctgcctagttgcctcctgcttctccgctacctccttcaactgctgctccttctgcttcaggctactgcttagctgctccacctggtggcggaggccctgggaggcctgttcttgctgttggagggtctgtgctagctgggcctgcttctctttggcctgctgcttcaggccagccagttcttgatcctgttgctggatggtggcattgagtgtggtgagctcagaggtcagagaggccacctgggcagtcaaccgggccccatgagcctgggaggcctgctccagctcttccttggcctggctgaggttggagatggagctctgcaggtcagtgatcaggctagacagctgctgcttttcttcttcgaagtggccccgctcagcaagcagcttggcttcctgctggcctcgctcagtctccagcatctctaccctggcttggagctgtgtgttgtttgcagcaagagtggctgcctcttgcttcaaggtttccagctggtggtataaagagacaaactgggatcagcatgactcctcagtcatcaagactcctctggaaatggaggaacaccaggaacccaaatgtactgaatgtgagtccacaccaaccagcagcacacaggtctttctgtgcattcctacctgcaagacatcacccagcacctcgcccttctcctggggtgggttatcctgcagctgggacaagtgttcttccagctgtgaaagttttccctgaaggatttcgttcttctcttcaaggcatttctgggagtaaatgagacccatgtgaacagagagggggaacaggcaccagattaccacacaagccctcataaacatcagcaaacatggggcccatcatcttgttaccaagatctccttttgccctggcctagaaaaaagcagaaaccatggaactgggagcatgagggacctgattctctagacctagttctaaggcacaataaagtcataatgtaacctgcttactacttccccaaggctgctgagtttacttcaaatttccttaccgtatacccttcctcagataagtcttgagtcctagattatccaaatcaccaccagctgcccaccatcctctgggcagcaataccactggcagcagctgcagcaacccccagtcccaaacccacttcttcaccactgttcactaagcacctacaataggctatgctgggttcatccctaatttttttttttttttttttttttttgagacagagtctcgctctatcgcctaggctggagtgcagtggcgagatcttggcttactgcaacctccacctcccagattcgagagcttcttctgtctcagcctcccgagtagctgggactacaggcatgcatcaccacacccagcttatgtgggaggcagctactaccattcctcttacagagcaagaacctgaagcagatgctaagtgccttgatcaagggctacatggttattagtaagtggccaaattgggttcttaccaatagtaacaatcacaactggttcactgagagcttactttacactacacgatgtgtgaagtgctttacatacgttttctcataataggtgatgaggcagctactcgttactactcccattttagggaaaggatgcttagaaaaacagactgattaacttgtccaagatccacatcttgtgaacagcagagataggattgaaaggtgtactataaagtgagggcattgactggggaaaaaaaaaataagttaaaaaaaaaaggtgtactagactgaagcccacaatctttcaattacagcacactattgaaccttgaagagaaagcaacttaatacccaaaggcccagaagagcacagtggtaaactggactcagctttgcacatgtggtcaagactgtggctgtgaccccagcagagggttaccttgtcctgcagggctgcgctgagctccttctccagctgggcctgcttctctagccactcctgagtggccttgctgtgctcctccgtcagctcattgagggcatcctgtagctgctgcagatgactggcaaactcccgcagctgagacgggcaagtgagaatccccatcacccagagtcaacgctgaccccaccactgctgtctgctcccagaaccccaggggctggatgcctccaattatcctgccaaccctctacaaaccaatcacagccatcacacctctaattcagaactacaaatcaacatttagggtcacagcccagtacccgggaagccgccaattatgggataaggaaaggggcaaaatatgcaggtctctggagagactgaagcataagacaggtgctgggacattcttctcaaccctctcttggggagccttccagaccacctcagccctgaggggcctccatgcacacaccaccttaacacccaccttaaaggaaaggtctccattctcctccgaaagctggttgattttgcgatccatctggctcttctctgtcttcaggtcctggcactgcttcagggtttcatgcagccgcatggtaaggctgcgagggagggaagcagtgagaagagagtatgggttcctggctgggtgaggggaggggctggggcctgggaaggaatgcagggagagctgtacctctcattcttgtcacgcagctcctcaagctccttgggctccagtgggctggccgcctgcttctcattcagcagggctaggcggtcaatgcgctgctgcatcatggctatctgtgcatctgcccagagtggagggaggaggagaggagaatcagaactatgtgcatgagcggaactatgtgcacagaactatgtgcacaaggggaagggaggagacggcatagggaagaggaggaatatggtatccaatctaagggaaagagaagatggggacaaagacagaacctagcttccaggaggtcagcctgaccacaggcccagggctgagctctcagctccaggggccagcagaggggacaacatgggaggccaggggacatccttccggcaagtctattcacacatctgccagtgtgccagccacctacccttctcggtgaggagcttgcggttctcagctagctccagctccagctcatccctattacttctctcatcagcaagctgcttcttcagccgtctcatctggaactgtggggtctgcaggatatcacccatgggagaagctggagaacctgagagaaagctgaggagggagaaggcccatatgcattggtaagcgcctaagatctgaagcaatcagcaacaggcagcagtaagggagcggggtctatggaagtgcgcactagcagctgggaggcctgtgcacctgggttgtttgcagtgctacctcaagcctcatgacatgatcttgggaaaacttttcttctcactgccttaatttctttgtcagaaaaaaaaaaagtgatatattctccttggctctgcagagatgtgctaagagaagagacttcattgtagtctccgaggaagaagggtattccataaacagggaacagcttttgagggaggccttctgcacatgacaaatcccaaccacttcccccagttaatactgggtgaggtgaggagatcccagatctaccggatactctaagcactcccagaggctggttaacatcttaactctagaagttaggaatgtgaggaatggatggatgctgaggccctatcccaggaggagaggcccagaacatacttgttcccactggaagaggaggcaaccttctgtagctctaggaagcgaatctccctcttggcctggtggctaggtggggagagctcttcagggaatgtgctagaacaggtagaaggcacaggagctgggggtaagaaatagacaaaataaatcaacaaaggttagtaagaaggtgtaaagatttgcacctttatgcaatttgagaactcgccttagtgggagtatatccatggatacttatatgtaaactaccaaggaaggcactgggcagaacctgaaacctggtgcctgggttatccagagttccgtgtctctaaccaaaatgaagtgcagggcttccatttctacagagcatcattactcagagcacagtggagtgacggtgtcctctggctcagaaactgcaccaagtgctcaagctttttcctcgagtccacactgcagagacggcttggggagccctgagcaggatctccttgcagcccccaacaacctttcctatcagagccattggccaccatttggaattcatcccccctgaagccttgcacctccaaaatgccctcctcctcaaaacccttctctttccgtggtttccgtgaccccttttgtaggactctcctacctctaatcacccattcttaagtctcctcatctgctcctccctcctctacccaccctctaagctcccagagatctgatggggcctcttggctctgcccatagtgcccacggcttcagtggccatccaatgctgacttgcaaacctatcttctggtccagagcctgctcctgaattctggactcacatttctaacatctccacctgaaggtctcatgaggaacctgaatacaaggaacatcaaactcaacggctagaactcgcctagacctccttcttacattcctatcatccaccagctgacctcttcatcagaagaccagcagaacgatcactctttctactgtagtaccagccgaggccattgatatattccgtacttagattccttatcattatttcctggtttatgtatctgcctttccacctagaacatgcactacatgacgggaaaaacattttttaaaagactgtgggccgggcgcagtggctcatgcctgtattcctaacactttgggaggccgaggcaggtggatcacctgatgtcaggagttcgagaccagcctaatcaacatggtgaaaccccgtctctacaaaaaatacaaaaattagccaggtgtggtggcatgcgcctgtaatcccagctactcgggaggctaagcaggagaattgcttgaacacgggaagtggagattgcagtgagctgagatcgcaccactacactccagcctgggcgacagagagagactctgtctcaaaaaaaaataaaaataaaaataaaaagactgtattctcagcttctaagcctagagtaatgattgtttaaaaaataaaaaacaaaagtaggtatgatcacttgtaaatatcctacataactgctgccaggcagcaaggaggagctccataggaactgagatgatacaacatggcccagaaatcgacctactccattacacacacttttcctgagcatcaactctgccttgtgttggggacagaaacaaacccccaccatacttgacaactcaggatcctagtattccccatttcagagatgaggggattctcaggagtgtgtacctacttacctttctgtaggaagttctctaggtcctcattaaggtttagcccgtcctcatggtccagcacaaatttaagaatgacagccaactcagcctgggccacagggagaaaaagagcatcacttaggtgttaggcctctgaagggatggctgccaggagctccaccctggcagtgccagtccccggctccctcatgccctaggagcctgctggatcccattctccctctcagagctgaggtcctatgacccagccaacaacattcaactagagatatgttcaccccacttgtccccttccctcccacctcccctcaagatgtaccgaagtcagagttcctgactgacttaactcctgaccacaagtgaagtgactgttaaggaaagtaacacaatcagaaagttgcttttattgttattgttgttaagaaacaagatcttgctctgtcacccaggctggagtacagtggcacaatcatagctcactataacctccaactcctggagtcaactcctcctcctcagctccccaagtagctagaactacagacacacactgccacacccagctcattttttttaaaaaaaatattttttgttgagacagggtctcgctatgttacccaggctgatcttgaactcctggcctcaagcaatcctcctgtctcggcctcccaaagtgctgggactataggcgtgagccaccacgcccggccaggaagcttttatatataactatgttggcctcttccagatgaccctaccagaggaaaggatgagataaatgaagtgaaagttctgtgggggaaaaaaaacacacacacacagaaacacatataggaacagagaataatttctacgtattatcctaaaacacattacagttaaacatatgcacataaaaaaggacttgaaagtacatcctttaaaaagttagcaaactctgggaatgagtttatcggcaactgttatttcctcctgcatgcttttcaacgtttcccagactttctatgatgaatggcaataattgctataactgtatttttaaaaagtccagtatctgctgttcaaagaaaaacaagtcaggtgaggtgaagcatgggctaggcctgctaggtggcatggaggcacaagggcttacctgaattttatattcaaactgttcccagtccctgggacttttggagctcatggtagagtggtataagagcagcatggtcatctagaagccaaacaggaggcagtcactgagtggggctgtctctcttctcagtgcccccattctgggctgttctggggactctgagctattccggtgactcttctaaaagtcctggaattcagcaatcccaggccaccatccttaacagctccaggaaacactttttttttttttttttaattaaggatagtgtacactgtacaaaaagctgagcgccaagattcctgcatggctcaattcctggactcatggaaccctgggtgtgaagctttaggtaccctctataggccagcacccagaaagagcagagggaatgacttaagactgagctataataaaaatatggtgatagccgaatgagacctgatttctgccaggtctccaccgaggcccacagtaatggtctagtaaaccattgtttgtttcataatctctgtcataagatcatgggctcctagaatccttgggctaaattagcctctgtctcaagacaggtggctgcctggttctacctccaacgtactagagccccagaaataaagcacccatcatctccccttgggttaagagaaggccctgcagggtccctcaggtaccatcaccccaaccctgccctgcctccccagtctggtattccataggtaccttcgccagttccagctctgatccctctagcaccttctgtgcagataccaggcattctggggaagagggatgttttcgattttctgcaatgacaacaacgtagaaaacagggtgaacttcctggaaaccatacctgagatcccagaacactgaaatctggggagcagaatggctatctctggtggggctatgagatgtaggcctccttactcctatggcctctttcccctgccttacaattttccatctgaagtcagttctatcctgggtcaatccaagggctacagggataatggaagaagaaagcagcctcggaattcacagcaactctgggtcatgatgttgcactctcccacccactcaccaactctcagcaccacagaggaagagcccagagatgccaggtcactttagaatcctgttccaactgaggtcacagagtaaacctatagctgagtcagaaaaggacaactagggatacgtgactcttatactgcccgagggtctgggctcaaattactaacaccttactttatctaaataaagcctcacctttcctataattctctaggggtggagatggcagctagctccccatgtcaaagacgaggactctgtggtctaaggctggacaaggggaggggaactgaaaagcactgtactagaagctttgcatgtgttcttatttaatccacccatccacttgaagagcagttatctccatattatagatagggaacctatgtccagaaaggtcacacaagcagtgaggggggtcaagatcaaccttaatgtgcctctgcccctacacctatcgcctaagcaattaattcaaagttatctgggaaaaacagtttttcttgcaagggaaagagactcattctctcttctgtctccttgaagttcggggaaacagaaacttaaggtgctcaaagagttaaaagtgacaggtcccaaaaagtaaccttctggctccacctagatctccgagaagggctctgggactgaagggacactcttcttacaccaactgatgaaggcatcacaagacccaggggatctgaaccagctgttttcatctttgtgttaaagagtggggagccttgaaatttttctcctccagacacccatgaactagttcctctggactctccaatcccacgagctgaggaagcagcttcttcatagctggataagaaaggtgcttactctgcagaaaactgcacacaaagtccagtctctctgacaccggctgcttcaagatttgctgtccctcttcagtgccatggctagaaaaagagcaagtattaggaccagagtattcagcaatctttgcctccttgctgctgcatttcatagtacctccccattccttccagtcttgatctctgctggatctggaagagatccagatcagatcctggaggcaggtgacagataccaggacaccatttatccagatggaactgtgtggtgggtgggaagaggggacttgaggcatggggttcttctggaaaagatggcactctgccaccctatttgcaaacataaaaaagctctgtggaaaggggccgagaggagacggaggcagcacagatgaacgggaagctatattacaccatctggaatggctcaactctaaactgtcaggaagcctggagaacacacctaggttaagagtgagagaagaccatggggagggaaaaacatccaagaactgaaagaacaggaggaaacaaggctctgaagtgacagggtgaagttcccccactaggctgaaggctgagatggcaaaagcctcccagaggaggatcccagggactagagtgttgtttgtttgtttgtttgtttgagacagaatctcgctctgttgcccaggctggagtgcagtggcacgatctcggctcactataacctctgactcctgggttcaagcaatcctcctgcctcagcctcccaagtagctgggattacaggcatggaccaccacgcccggctaatttttgtatttttagtagagatggggtttcgccatgttggccaggctggtctcaaactcctgacctccacccacctcagcctctcaaagtgctgggattacaggctggagccactgcgcccagctaggactagtattcttgattagtggttcttgtctgtacttgcttaactggaagagcgggcagtgtgaagagagccatgaggagagggagacagcagggggagctctcacacagcccaggaggctgaggcaggagaactgcttcaacccaagcgacagagattacagtgagctgagatcatgccactgcactccagcctgggcaacagagcgagattctgtctccaaaaaaaaaaaagaatactagtccctgggatcctgctctgggaggcttttgccatctcagccttcaacctagtgggggaacttcgctggatcccctagctaactgcagttccattttcagaagcagcaggtgaaataccacttcaagttagaaagctgaattctctaggctacagtgggagatcctgattagtgggccccttgcttctcagaatctacactcctagttcttagccaactttctggagggcagggcaggcccagaaccttccaatgccagagacatcctgcaagcataagcatcatccaagccaagactatgagtgtacctccccccataccccatgtgattacacaggcttcttccaagtgaatccctcccagaagcactctgtctggatagttggtctgagatcagagactcctacaaagtcttgaggagatgctaatctcttacagactcccaaatgagccattttccctacccacccacaatctggaatgttgtgactccttggctcagtgtagagcaatatttacctcagagtattccattaactaaaataaaaagaggttctcaggtgaaatgtttaaaaaatgctgggttaaactgaacattttttatagaagaagatacaacatgcattatttcctaaacctatttgaccacaaaacccttttcccccaccccctacaaagcctggtgtaagtaaagctgcatggagcatactttggacaacagtagtcctagagaaatccagcccatcctttaagactgtgttgaagtctcatctctgtcaggaagccatccacaactcctgccagtcatgcctcggctgtcctccaggtcttcctgcagcactcatgaatgcaactgcaccatttacaactgcccactccaactgcactagctgaaagccaggaataaagtaggtgctcaatacatatgggctgactgacaactgagggatgctttttactgagaagagcagaaataaaagtcagcaagacaaaaatgtcagacctctaagttttctggcaaaatgcctccactatactctgttattcaagcttcacagctatcaaacagacgggacagccttttttgctttagactattcacgcacagaagaaccaaaagggaaacttgtcagaggggttgatcccagttaattttcccagagagaaggccaagtggccaagcagttaaaccctcaactcccacagcttattttttttttaattttttaaagaattatttttctcagggtgccccttgtccagtgtgcagacaggagccacccaactcccacagcttctatctaccctccaaccttgccatcctctgctgccttctgctgagaactaggctgctgatttaggttggcaccagtagcggtatcagaaatgtaagagccagaacatattaactaagaacctccatttcccaaaaggaagctggtctgcattgtcctggatctgagatggagattagcattaacctgggatttcaatatcgcctacctccaagccccacttctactgcagcctaggttcaggcaacaccctagaagacaacttgcaaatgagcatcttgaatttttggcccttcctatgaaaatttcctagcaggttataaacctacagtggctaacccaaggacaacacacatccttactcttgggcacatctactgctcttgtcaccaggccaaggaaatttctctcttcaaaagcaaaagttccttgatctattttgaagtcaaaaaagcatgctgccccatattgtgtgttacaatacaaggcatattatacctggctgcttcacttttagtgaggttaaaattaaacagagagttaggtattgccagactaatggttttaccacccattaatgtcaggtgcctggatctatcacttccttagggtttgcaaaataatgattttcaacagaagttgcaaaatgctgacttacaggtggtacacaaccccaactatgaagtatccttgacaaaaaaaaaaagtgaatcaagcttagatctaattatcagtatataggcaacaaggggaatagtggaacaagttaagccgtaccataataatgcaattaacaaaatccaggatttaaggatttctataagattaaaaaaaaatgaggtggtgtcgagtggggagagaaaaaagcaggaaacaaaactggtgagaggaaatgaccccctgatgaaagatcttaaacaccaggctgaagattttagatttctacctattagaaatgaatattcactgaggtttgatgaagagtcactgaagtgtcacaaagaaaacaagatttgagaaagattcttgagaactcgtgcataggaatgaactgcaataagggcagattagagaagaactaggccatgagggcctagtatccagaatgaggcagagggagggacgctggatgtgagcagagaggatgatgaccaattagagatcagcgccaaggagacagagaagtcaagatgatgttgaaatgtcctgcctgggtaactgggagagaaaatggtactgtctggaccaaaataagaatagtgacttctttcagaggtactaaggcaggtcctggttagagccatatggaatattaaaaaatcctgtaagataacccacgatcaacacacacttcaaataaaaaccactttagcagcagacccatctgtcctgggccacttggccccgctagaccttgctgatagagaacaccaactcatctcttcactcaacaaacattcactaaaacctaaacaatgtagcatcctaagctaggtagggaggaccccaagatgaatcagacacagttctagcctttgataagcttaattctaccttctttccctatcaatgagctgttacctatgaacaggtagctaaagtgcttgcttcagagatatgagtccctgataccagttcctaactgccacgtatggcacataaacaccttcaacacttcagtctatccttggcctggggcaaacaatctaatgtgctttttcttaaaaaaaaaaaaaaaaaaaaaaaaaaaagatgacaactgacctatgcttggtcccagaaaggtaggatactgggaggaagccccactttattcatttccgagataactgtgacgttcaaaggaaatgtgctaaagacacagaccaaaaggccaaactacaatccttgctgcatggtaacaacaagcttattaaatgctcatggacctcagaaatcaagttaattgaagcagtaaaaaccccagaagtgtacttattttataatggcttagaaagaggcatatctgtactgtgctaacaagttagagatgagatttctaggtgtttcttctttccttcagatgtgagagcttcccctttcttccctcagaaggctgcaaagagggcttgtggcatagggtagggatgagtcaagaaaggagggttgtagaagccttctggtgagacaagagatggggaacccaagagtgagcacttggaagaatgtgagggcgtggagccttggaggttctcctgtgcaagaatgcagaagcctcaggatgggacaagcgtaaaacctctcccatggagtggtacagcaactggaagatgaggtcaatgtattcttgcctttaggccccaccctggcttatgatgtcccaatccttcccctgatttctggtcatagccatcatcaagtaaagagaacaagtacagcccccaccccagcaatcagctttgccttagaggctagaaaggggtatggtgcgtactcacattctgtcaatgatcttgatgaagatgctgcagtcctggagctgcagcacagcctccacagggtcagccacgtgtagactgttcacctgtaaatcaaagggaacagcctagtgagaccgttagaagcaacatggtttgctccttttcccagaggcttaatgtgagtgcttacagttgtagactataggaatacaagaactgatgattctcaggtttttaatttcaggaaggagtgccgttgcactcactcatccagttacagccacctgaaatgcaaccatcagagagcccttcctttggcttcaactaaataaaagcttaaactttcctaagatgttccagcactgggagtattttggaaggatacaccaataaattggtactaccactgcttctaaagagaggaacttgacagcagggagtctgaggtgggaaaagaaaggctcttacattataactctctgtagctcttgaatgtattatagctctttgtatttcttgaacgtttacattataagtttctgtatcccttggatttttatattatagtcctttgtggctcttgagttttgaaatatctattcaaaacttaaatattacatatatgctatacactcccacaaacatataaaatcttattaatacattttatattatagccctttgtggctcttgagttttgaaatatctattcaaaacttaaatattacatatatgctatacactcccacaaagatataaaatcttattaatacatttttattctttccacacataaagctttggctgaggggagaagggaaaaacaataggggaacaagatgattttttaaaaagggggtggagggagccaagcgcggtggctcacacctgtaatcctagcactttgggaggctgaggcgggaagatcacttgagctcaggagttcaagaccaacctgggcaacatggtgaaaccctgtcctacaaaaaatacaaaaaattagccaggagtggtggcacatacctgtagtcccagctacttagaaggctgaggtgggaggatcaccttagcccagggaggtcgaggctgcagtgagctgggattgcatcactgtactctagcctgagtgacagagcaagaccctgtctccaaaggaaaaaaaaaaagaaaagaaaagaaaaaaaaagggggcggtgggggatgaaagaataggagctgggaatttcaaagaaaaacttcttaattctaatttagttgcctgttcccattctttggcttcagataggcatacatttaaatcagtttttaccactagaatattcaccaggggtcacacacatcaggtacacaggttattcaataagtatacatggtcaacctctacaggaaaacctcatgaattccacaggcactacagttcagaagtagcctgggctgaagtttacgtttttattactataggaagaaagggtttgctaagttaattattcacatattcaacactaagaggggagagagactgagcctgctttaagaaacaaggtattttaaagaacttcagcatagtggttatgtgcagacaactagattctattgcttacaaatgtgttctctatatttgggctgggagccagtacatacacactttgggcccagctcctccacaaacttgccagcaacctttgttacaaactttatttctctctgcactagtttcctcccttgccaaatggatggaatccctactttatctacttcaaaggaccagtgtgagctcaaatgggattatggatgcaagaacacattaaaaaatataaagtaggccaggtgcagtggctcacacctgtaatcccagcactttgggaggctgaggtagggggactgcttgaggctgggagtttaggaccaccctgggcaacataacaataccttgtctctactaaataaataaataagcaagcaagcaagctggacatggtgacatgtgcctgtaagtcctacctacataagaggctgaggtaggtggatcatttgagcccaggagctggagaagttacaatgagctatgatagtgtccctgcactgtggcctgggcaacagagacatctcaaaaaaaaaaagaaaaaagaaaaactaataaacataaagcactattatggttaataaaattaaaataatgaagtagacataacatttgtatttcttaatagttaagttagctgcatgcactatagaattaagaggatttttaaaaatcaatgatttctctacagacatgatagtatttatttgagttaaacactttcacatttaaaaacaacttttaggccaggcgcagtggcccatgcctgtaatcccagcacttggggaggctgaggtggaaggactgcttgaggccaggagttcaagaccagcctgggcaacataaggagaccctggctctacaaaataataatttaaaaaaatttttagctgggtgaggtggcttgcgcctgtatgctcgcgtagtccctgctactcgggaggctgacgtgggaagatcgcttgagcctgggaggtcaaggctacagcgagctatgatcacaccactgcactctagcctggccaacggattgagaccctgtctcaaaaaaataaataaataaataaatacaacatttaggctaggtgtggtggctcatgcctgtaatcccagtgctttgggaggacgaggagggagaatcgcttgaggccaggagtttgagatcagcctaggcaacatagcaagaccctttccccaaaaaattaaaaaaaaaaaaaaaaagagagagaaaggaaaaatagcccagcatggtggtgcatgcctgtggtcctagctactcaggaggctaaggtgggaggcagaggattgcttgagtgcaggagttccaggctgctgtgagctatgaagctgcaactgcattccagcctgggtcacagagcaagaccctatctcaaaaagcggaatcttttagatgaatcccagttaaaacagattaaaattttttttaacgtgaaataaaatatgacttattgacgtcttaaagagtttgctaatatatttataatatatttttactgtcttttgaaaaaagctcaatctaattggtcaggacaggtcattgtaagttttctaggaagattctgaaaacttcaggccaagattccattttacctgcagaaaatgaagagactgccaaggctaaaccatctcctatcaatacctgcaatctaggtaaaacattcaaggactatggatgcttgttcactaacaagactaaaaaatcataccaattagctgatgtaaagtctcctaaggaatctggattcatcacatataccaattaagtaataatccagccacagttcctttcatggatataaaaatattttttcttcctgtgagttatttttgctctcaagtgagaaatcatttaaaagttgaggaagtagagaagttccttcatctctagtcagggcataaaacatgagagtgaggaccaggctcaccacataactcaagagttgcctttaaggattgcaaggttgcttaaggttgtcaaatcttaaaataccctgtaacagtttattcattattaactgctgtttacagaatagtttcaagctataatttaagtattaataaaataaaccactaatttatttttatgttataaattactgaaaattcagaagacaaaaaacagagctcccaataattctagtattttaatacaggtacttttagcattttgatgtatttctttcgttttttctaggtaattttttttaaactgtagttggaattatcatgtgtgtgtatgtgtatgttctatgccactcttctcactaacataacagatgcattatttcatgctactacagtttcataaaatttgctttagctccacaacttttgtttaaattgaaaacattctctatactatatttatatatatttttaagagacaggctcttgctatgttataggttggagtgcagcagctatttacagatgcaatcatggctaactgcaacctcaaactcccgggctcaagcaattctcccatctcagcttcccaagtagcagggactacaggtgtgcactactgatcccagcacatataactatactttaacattttcatgcatgttctttgtttttttttttttttttttttttttgacacaggctttcactctattgtccaggccggagtgtagtggcacgatcacagctcactgcagcttcaacctccacagcctcaggtgatcctcccacctcagcctcctaagtagctggaaccacaggagcacaccaccacacccagctaatttttgtattttttgaagagacagggtctcaccacgttgcccagggtggttgcaaacttctgagctcaagtgatcctccacctcagcctcccaaagtgctggcattacaggtgtgagccactgcacctggcctcatgcatatttattgtgacttttcagaaaaggatgtaagtagctgctataaataaaactagtcttaggccaggcgcagtggctcatgcctacaatcctaacactttgggaggtcaaggcgggtggatcactggagctcaggaattcaagaccagcctgggaaacatggcaaaacccagtctctaccaaaaatataaaacattgtattttttttgaggtcacattaaaattgaggtcagaagtttgagaccagcctgggcaacttagcaagaccccatctctacaaaaagttttttaaaattagcatggcatgtacccctgtggtcctagctacttggggggctgaggtagaaggatggcttgagccccaaagtttgaggttacaatgaactatgattacatcactgtactccagtctaggcaacagaatgagactctatgtctattttttaaaaaaagaaaaatggttggctctccaattggccctgattaatcagtactcagggtgaatactaaaatatcctgtgtcaactagcatgcccaggaagtattttaaatgtcaagaactatgatttattgagataacatgctaaatgactgcatgtatgtgggtacttgtgcacactatatgtatctcattatccttgtaattaccccatgagatattttattttattttttcatggtgccaagagaaattagaactttatgaggtattttaatttaaaatcatccccattaaaaaaaatgatactggccaggcgtggtggctcacacctgtaatcccagcactttgggaggtcaaggagggcggaccacgaggtcaggagatcgagaccatcctggccaacatggtgaaacccgtctctactaaaaatacaaaaaaattagctgggcatggtggcgtgcacctgtaatcccagctactcgggaggctgaagcaggagaattgcttgaacccaggaggcagaggttgcagtgagccgagatcacgccactgcactccagcctggcgacagagcaagactccatctcaaaaaaaaaaagatactgaagatactgagaggccaacttgccctgggtcagagagaccagtgctgtgattctatgctgggcatgtgactctgagacccatatttatcaccacactccatggtctcctctgtttctttagctttatttattatttttatatatatttttgaaacatggtctcactctgtcgcccacgctggaatgcagtggtgcaatcatggctcactgcagcctcaaccttcagggctcaagggatcctcccaccttagcctgccaagtaggtgagactacaggtgcacgacaccatgcccagctgattttttaattttttgtagagacaggtttttgccatgttgcccaggctggtcttgaactcttgggctcaagcaatcctcctgcctcagcctcccaaagtgctgggattacaggtgtgagccaccacatccagcctctctagctttaaatatccaatgcactctattattttttcatttgccactgtctctggtagaaaatgtatgaatgatctagcaaaagaattttgatgaagtaatcggcaaggcaacatttgctgatggacaatggcaacagacagaaaggtggtaagagagtgatgagaaccttgtcctagattaaaggcctttgaagaccaaagtccctgcatatgttgatcattaaggtcagcatttaccacccccccttttttttttttaattttttagaccgagtcttgctctgttgcccaggctggagtgcaatggtgtgatctcggctcacagcaacctccgcctcccgggttcaagtgattctccggcctcagcctcccgagtgactgggattacaggtgcccgccaccacagccagctaatttttgtatttttagtagagacgggggggtttcaccagcttggccaggctggtctcgaactcctgacctcaggtgatccacctgcctcggcctcccaaagtgctgggattacaggcataagctccgcacccggcccacatttacccttttattcagaaaaatacacacagagcagatgaaaatgcatttccatgctgtctaaaggaaaactatttagtctagaaatgagaagactttacatagccctggctcctacaaaactcctctcctaactctctcaagcttcctggagaagtatagccaacaaaagagaggaagactacttacccaagagaggagtgcagccccccgggtggcgtggagtgtcatcttggtgatgccagacagtcactccaatgcgcctggaacccaagagaggaagaaaagcagttaatcatatcagatatccatgatcaagaaataaaggcgaaatggttcaatttgccaattctcaacacttaaatcactcttcactgaatccaccaagacaccatgggaatttttagaaagctgagtacacatgacaattactatagagcttacatcagagacgacaggaaagaattgtgcatttaactcaatgtctaccccatgtaatttttcagttccacagaaaatacaacatccaaagctggccttcaaccctactctttgggacatgatgcccttaaatatggaacaaacatggttttcagacagacctgggtctggatgctgatttaatgtgaccagggtcataggaccttagacaagcaacataacctctttcagtctttttctttatctgcaaaatgggatccacatacacctctctgggttattgtgatgcttaaagataaagcaaatagtacggtgcctggcacatggtaggttgtcaataaataattactgttcttaagcagaaatgttgatttctagctctttctacaggtacccaaattgtacctaacaatacctaagtccttggggaaactgttctagtttctggatttttatatcctccacagaaatgtctcacaaacacagttcaaatgggggattgagaatatccaaacttaggtctctggatgaggtcgagcccaattccggaggagatcccatgggacatttaatgaaaattaggcacctgtcctggtgttctcatccccaatttcctttcccattgagattctgccacctgcctgccaacccacccaagagaccacagaccagattaactaaatattcaccaacacctcctagcaacccttgcaattttcactaatctccaggggcacaatgagccctgcccccatctcctgccacacgtgctcagtctgtaattactctagaaggaggaacaagagtggtaagagccacatcacttgtaagtctccccatatattagcatctccagagtgtgggctctgtggaaccagtctcatgtatgcaagttggggataaagaaagacaccattcttgcccagaaggtgctcactgtctagtacgggaaagagatacgaaaatctgaaaattcactccccattatctcttggtccttcctatccaagtatactctatttatcagccaaccgaaaggtattttcttagttcctaaatatgatcatcctcgctgggagcagtggctcacgcctgtaatcccagcactttgagagaccaaggcgggtggatcgcaaggtcaggagatcgagaccatcctggctaacatggtgaaaccccgtctctactaaaaatacaaaaaaattagctgggcatggtggcgggcgcctgtagtcccagctactcgggaggctgaggcaggagaatggcgtgaacccgggaggcggagcttgcagtgagccgagatcgcaccactgcactccagtttgggtgacagagcgagactccgtctcaaaaaaaaataataaaaaaaaagatcatcctgtgctagaagccacatggaaaatgggagacaatgacatggtccttgcctttgaggggcttatagcagggtagggagtaaaattaaacatatgtgaagcactaacagaagaaaataattaaatgctaaatataactaaatgctaattacaattaagtgcttcctgaccctgcaacatccaacatgattccacatgtcataccagcatcagtcttggaattgagccaattcacctgggctttggcaagggcaaatgaaatggttaagagagctctcaggagggcagaaaagctaaggggcttatgttcctcagtcttggataattatcatcaagtataccctatccatgggcaagattatgtagcccttgaggccaggcatggatggatgcagatagccccaactactgcactgcaataaggcttttctgtggctgacaagactaaagctcgagggaccacacttggctctgtggtggggcggcaacagccagacactcaactggggtttctttaaaaaaaaggcctctgagctattaaatcacaaggaatgaggctgagatcaccgctcccccatcctcactgctgcctatagacttgcagtccttttgatgaggcccaacacttcgaaattttatctgcaactgtaggcagatcttgccccctttgaaagactcacagctgtgctactaaaaatgtcctgaggtttaaccaacctcttcatctcagaggcaaaacatacaaccctgaggtcctcccaggagagcctgtctaaaactagttccactgttcaagaaaatgagtgtcaaggctaaatattcttttctgtgttccccaggcacagaaatacgaggaacccaatattcaccactaggaactcctgaaggaccttgtctgctcttcagttctaagcctgtaaagaggtactttcctagagacagaacatcagggtgagagaggcttcaggagagccccagccattccctcttctctgggtaaggaatgactgaagccaggagcacagctaagtcttctacattgggactatagctttaagcagactttggctgggaacccaagggctcccagccagagtaccatcctccccaccctccccctgaaatctgaggcaggccccacccagtacactgggtgatgctgatggaaaaacagatccttgcgattgtagcctggaaccatttcacagaaggatctgctgagatccaccccagctggatcaggcaccccccgtcccccccacaaccctcactcaataaacaaagaaacaaaaggccaggccctctgagggcacctttggagttcccatctacctgattctctgagaaagaaattcccccagaatctaaaacagaggcctcaccgagctggtaaggcaccctctcttttccctggtctcaagaagtaaccaaggacacagaagcagttgcgttataaacttaaggccctgcatcctttttacatttcccaaactgacacaatgcagctcccccacatcaggacaaattcccacatttacagtaacccctgtttccagaaaataaatatcaagataaggaaagtgacactaaagagacacgcagccactctgcctgtaccctctctggaccttaaagagttaaagcctagccatgatttcctaccagggctgaggctaatgtaaaccacctgctcagacacaagaagcaggaccagagggtcaagttgctgagctctgaagtctgttctgaaaaagcttcagttttaagtacagaacaagtgataggccaaaggccagagggtctgagctgcagcagcactgctctccttaccccgcccttggcctgggtgccagctcctttgagactgcctcttagccacttactgcccatcaagggaacaccagacctacctcaagataacaccaaagtgacctttggtcccagagagttgttaaactataccgatctctcagctcatgggcccttgcttctgctgaaccctcattctcttagtgctaactcccactcccagaatttcagggcccaaagcccacacaagctcccacctcaaagggtccttcccagaaccccacccccttctccacctgatagttccaaaggcctacagcctcacagctcacaaaggaaatggctgccccatctgtgcgccagtgctcacttgcaaaatttaccaccacttaccctgagacgctgcctgcctgtagcctaagaattccatgctctgtacccctttcttagaaagatactccccatctgagagacactcacatccaaagagtgaaaaccctgatcttggggctcctcctcctccaactctaggacggataggccaggaggcacatgcaagcaaacaccgagatctcacctggcaggttacccagaggggccaagccaccttgccctaggctaataagctataaaaacagcataggaaatactttgctggtacatcccctgcctctgagaagataaaaggcaagaggaccagtggctccaagagacgccatacagagaaaaacaatctttctcaattcctggggagtcctgggtagaccgtctggtccaagtccaaagagtttcctgaggtcggggcaaaccagtttggtccatctaaagggactagcttgggctgaagcctcctcttcacacagaccactccatctttgtagcctagagtttggcacagaaccccaaagccctggagaggaacaagggagggattacagaggaaaccaagcttctctggtttcttcaaaagtggcttacagatgtctgccccttctccccgttctctggagggtccagatcaggatgatggcaaaagagctgcaatcaggaaccagacctgcaaccaggcctgcagccatgtattgtactggggcgcgtacacatacacacacacacacacacacacacacacacacacacacacacacacacacacacacacacacacactgacctgggccccccaccactatattcacacaccctggtccctatcagctgacaaaatgaaccttttttcactgcccaccaccgtgcacacacccacggcctcacgcagaaatggtgaagccctctcctgagctgtctctacagctcaacgtgcaggcaaacacgctttccttctctgaacaaaaacatgctgacatctacgcaagggggaaagaaagcaaccctttgctctgaaaggcgccaactcccggatgttggcaagctctgctccacagcgcctgtttctgagtatgtttacttgctctccctcttctctccctcccctttaaggatggcgcaggaaagggaggtgaggggggagaatccaccccaccccctcgtccatgtttgaacaaaaacccagagaaagagtgagggagaaaaagtctcggtgcgggggggccttaccagactcctaaagccaaacgtatctacaggttttaatccgccattagcatttaaatcttgaaaggagaggaggaagggggggccagtggaaagtaaccccacacacaaaagaaaagttgttggttttcttctcagtctgcctggcaggagcgatcttcctggctgacagccagaagtgcgtcacagccaggagtctgctttctttaaaggcacagcaagcttccccgatctgggagcgacagcaagcaggggactctcagtgggggtggggcccagagggagggggtgcactggagaggaggggctgcaaaggggaaggctggaggcttggtccacgaacaagaaaagcaggacgaatgggggcggcgggttgagggtgaaggcacaagcaggcaggcaaaattactgaactccaacagcagcaagagccaaggcaaactgtggcataaacacacaaaacacatcttacagtggcctgcctgacaaactgggatcaaccggacactcccccttcgctctgttttccacccagagtttaaggcagcagtaataatctgtccatctctctggacagcaatggaagggtaggacaagggctgtcctgataattagatcagcccctgcctggcggaccgcagggcaaggaggaagacccgggaacagaggctttgaagaacaagcaacatgcaggccctctgatcgggggcaccttcctgccggccccagggcaggctgtgtctttaagtacaaccatgccactcacacacaaagcgccctgccaccttccatgggcaccgcctgccctgctctgggacacggccacccactaaatccattccccgagggaatctctccagcccataccttctgcgtggcaaggccaggatgccgtgctgtgcccgctcctccccctccgccacccaaacaagaagcccaggcagattctggccctggagtacaggcctgcgctgtcctgtgctgcgtgctattgtcggctgtggaatggccgccaaaatcccagctgtgctgccagaacctaatcccctgttccgctgagcatttatggggaggggctgaggggccaaggcacgagaccgagtacgccaggcactggctgcagcccttaacagacgcaggcacggggacttgtagactctgcttctcctacatggctgaaaacaaaagatgtctgactcttagaagacaaaatcacagcatttccccccactgaatagcgaacttcaccaaggctgaaagggaagcccaccagatggtcaacaggcaccccctaatcttatgccacaaacatttactgagcacctactatgtgtaaggcactcctataggaaactgtaggaagtatacaaagatgaattaagcccagcatccgcactgaggtaggttgtaattcacaggagataagaaatatgacttgaagattaatttcaaactggtgtgctaacttccataaaagctgtaaagaaaaattctaaccagtttagaatagggaaggattacgaaaatgaagtgccattttaatttggaccttgaaacacacaggtagcatttccccagatggaaacagagaggtgtggggaggaagagaaagcagagaggaggcatggaagcagtgggagaaagggcttgaagagtgaggtggggtcagagagctaggagaatcttgaacctcaaaccaaggaatcaaagacttgtaagtttgtttgttattaacacagagctgtggtatgacaaaaactgtgccccaagtttattctgatatatacctgaatgagactagcagcaatgaggtgagtcaggaagctgcacagtcaggagacaggtaatgagggcacacaagagggtaaggtaagaaagaatggaaaggggccttggcacgacggctcacacctgtaatcccagcactttgggtggaccactgaagtccgagagttggagaccagccggggcaacatagggagatcccatctctacaaaaaatttcatgaataaaaaattagccgggtgtggtggcccgcacctacagttccagctacttgggaggctgaggtgggaggatcacttgaacccaggtggaagctgcagtgagagacattgtggagacagggtaaagaactgataggaggcagagagaggaactgtacaggggaggaaagtatgagggatgatatgcagaattaaactgaggagatgacaggatgtcagaacaagagagaaaacagagtataataaatagtagctggtggggcacggtggctcacgcctgtaatcccagcactttgagaggccagcctgggcaacatggcgaaaccctgtttctaccaaaaaatacaaaaaaccacacaaaaaaacaaaaacaaaaaattagccaggcggagttctttttttttttttttttttttttaaagcagggtctcactctgtcacccaggctggagggcagtggcgagatcatagttcactgtaacctcaaacttctgggatcaagtgatccatctgcctcagcctcccaagcagtgggagtacaggtgtgtgccaccatgcctggctaatttttttttttttttttttctgtagagacaggctctcactatgttgcctaggcacagcattattttaaattcttctctaaaaattctatgcttctcccaaagccctgggatacaggcatgaaccaccacacctggcccacagttgtctttgtctttttctactaggagctatactatagaggtcacaatcattggctacagtttataatatataggctaaaatgttttacatataagataaccagtaaaacttcatgatttagaaacaaattagtgtcttttttagtgtcagagtcccagctactcaggaggctagggtgggagaattccttgaactcggaatgagcagagatcatgccactgcactccagcctgggtgccagagcaagactctgtctcaataaatacataaataaatggacagatagataaacagagagacagaaagacatatagtagctaatgcttactgagtgcatactatgtacgcgacactattctactgacctaatatgtacgaactcattaatcttaaaaactcccttaatgaagtaggtaccattatcacccaactttagagaggaggatattgagccacaagattaaataatttgccaagatcacatagcaagtaaatggcagaagtctctaccacatgctgctaactatttgacattggcaagaaacttctgaactttagtatccctatttgtaaaacaagaataaagacacctgttataaagcaatgaaaattaattcaataacacctataaggtgtccaacacactggctagcatgtaaggcataggatgggtgtttcctgcagactaattcctacttggcattttggtcccttgtcaccaaggtgtccaagcagaagttggctcaccaattgtttgggaagccagagagggtattctgcctggagcaggagactggatcctctgtctgtctgccttcttcccatcagtctgcctctctagattttactttagggtccagctcaaatatttaatatatttgatttaatattcctaactcctcaaatatttaacagttaacaggggttactttggggggggggaggagttagattgtagggaacattcacttggggactttctatgctgtatgtttgcttttttttttttttttttgagatggagtcttgccctgtcacccaggctggagtacaatggcatgatctcagctcaatgcaacctctgtctcctgggttcaaatgattctcctgccacagcctaccaagtagctgagattacaggcacctgccaccatgcccagctgatttttttatttttagtagagacagggtttgaccatgttggccaggcttgtctcgaactcctgacctcgtgatccgcctgcctcaggctcccaagtgctggattacaggtgtgagccactgtgcctggccttgcatttatttttaataatcttgtattacactggtgataagaaaaatgtaactacctcctactcttggcacttatgtgtatatgcatgaaaatcttgtcttcacatctagaatggaaattcctcaagggcataaccagttccacctctctctctctgtgatcccccataacacctagcacactagggctccttaaatctgcttctccaaactacatctggatgtcaggtttacaaattcaactttctggccaccagagaatgactgtggtgggtggttgggatgaggtgggggtgggggtcagaccaaggctcattgctgtaggctccccatcacctgctgcttcttccaggccctgtaagctattcccactgtatcatttgtagtctgtagttagcaatcactattagtagaaatggaagttcttatccaaaggagcaccatgaaagcaaaggcaaagcagataccaaaacttttacagaaaagcaaagtggcaaacataattgtttgggtttttgttgtttttgttttcttgagacagtctcactctgtcacccaggcttgagtgcaagtggcacaatcatggctcactgcagcctcagcctcctgggctcaaacaatcctcccacctcagcctccggagtagttgggaccacaggtgcatgccaccacgcctgactaatttttgtatttttttgtagagacagaatttcaccatgttgcccaggctggtctcgaactcctgggctcaagcgatctgcctgcttcagcctcccaaagtgctaggattacaggcatgagccatcacaggcctggccaaacttaatttaaagactggcattatcaatgctccagaaaatgtataaggtgaaaataggagggaggcctgctaaaactgccctggccacatatggcaatgcatcagccctgaagcttcctagcccagatagaattgatattgtctcaaaagcgtacaagaggtctccccagcctggccccttgctctaaactcaaggcaacagcttccagctgtgcagcttccgagaggctgaaccttcccctagaacccctctgcaaagctgccaagtttctgggccagctcttcaggacagcccaaggagcctggccagtttcgccaggctttccctcctcttcctccctcctgtggcagcagcagaatttccacagcccctctcacagcctagacaggcagcaggcggccacatggctcctgcctgattcttactgtcctcagaagagcgggaaaggagtggtaaaacctttctagaaaaagagaagggccgggcacggtggctcacgcctgtaatcccagcactttgggaggccgaggcaggcggatcacctgaggtcaggagttcgagaccagcctgaccaacatggagaaaccccatctctactaaaaatacaaaattagctgggtgtggtggcgcatgcctgtaatcccagctattcgggaggctgaggcaggagaattgcttgaatcctggaggcggaggttgtggtgagccgagatcgtgccattgcactacaccctgggtaacaagggtgaaactccatctcaaaaaaagaagaaaaagagaagaaagaaaggggtggagagcggggagagggagagagagagagagagaaaggaacaaaggaaggaaaagagagaagaaaggaaggaaagaaattactttaaattcagtagggagggctgggcacagtggctcatgccttaatcccagaactttgggaggtcgaggtgggcagattgtttgagctcaagagttcaagaccaacctatccaacgtgacaaaatcccatgtctactaaaaatacaaaaattagctgagtgtggtggcaggagcctgtaatctcagctacttgggaggctgaggcaagagaatcacttgaatccgggaggcggaggttgcagtgagctgagattgcgccattgcactccagtctgggtgacagagtgggactccattgcaaaaaaagagaaaaaaaaagaattttaaattaaaataaataaataaatttcagtagagttcagatagaggttgaagcggggtggtgactggttaggagcacaaaggttatttcaaagggtcaggtgatcctcctgcctcagcctcctgagtagctgggactacatgcacatgccatcgcatcaggatttacattatcatttttgaaagtttaaacaaaaaaagactggagctgggtgtggtggctcatgcccgtaatcccagaactttgggaggccaaggtgggaggataatttgagctcaggagttcaaattcctcaggagttcaagaccagcctgggtaacatagcgagatccccatctctacaaaaaataaaagaattagccagacatggtggtgtgtgcctgtagtcctagctactcaggaggctgaggtgggaggattgcttgagtccaggagtttgaggttatagtgagctatgatcatgccactgcactctagcctgggcaacagagcaagacacgtctcaaaaaaaaacaaaaacaaaaacaaataagtactaggagagttcaagtccccagtcatccccatgggatgattctcacacaaataattagcctggcactcaaggccctccatgacctgcagcttctagagttctagcttctagagtcgttattcccttacccaaaccctccactctgccaggcaggtctataaagttacagtttgtcctgagaattagacaagatgaccgcaggggacaggctctggattagctacgaattacaacagtaacagcaacgataatgatagtctttactatgccaggatgtaagtgacagagaaaagactagaaggcattgtattgggcagttttgtttattttactttatttttttaataaaattaaaaaatatatggaactcttcacaaatttgcatgtcatcctcgcacaggggccatgctaatctctgtatcgttcctattttattttgttccaattttagtatacatgctgccgaaccaagcactgggcagttttaaaaatgaagaaatctgaggctcaggaattaggtgacctacgtgatctagtcatgtaagtagtaagttgtctaccttgtccctatattattcttttttgtttttttctttcaagatggagtctcgctctgtcgcccaggttggggtgcagtgctgcgatctccgctcaccgcaacctctgcctcccgggttcatgtgattcttgtacctcagcctcccgagtagctgggataataggcatgagccactgcacccagccagcctatattattgtctacagctgttaaataggcaatcattgagtgaatgaataaaagctagcacattctcagcaaatcaaagaagccgtgtgcttttcctcatgaaaatcaacttttttttattttttgagacagagtttgctttgtcgcccaggctggagtacaatggcacgacctcagctcactgcaacctccacctgccaggttcaagcgattctcctgcctcagcctcccgagtagctgggattacaggcgctcgccaacatgccggtctaattttttttatttttagtagagatggcgtttcaccatgttggccaggctgggcttgaactccttacctcaggtgatccacctgcctgggcctcccaaagtgctgggattacaggagtgagccaccgtgccaggccgaaaatcagcttcttaatcaaaataatcaaacagctccaatttcaaaattaatcactaaagaatttttttctgaggatccgagagctttacaaacactgaagggccaaaactcctctaaaaacagcaagcaccaagaaaagtcttgtactaggagggatgttggcagtgtctcaagggttagagggggaggctggaaggaaatgctggtgctaaagggaaggactgctgtttcaggagcctgaccttgagcttatttaccatggcctcattgtccctctccagaggataatggctgattaatgaggcagtgttggtaagtctgaggcttcctggagagaaaagcagagggcaaatcaaaacccagagaggattcattataacatccaacaggcccactcagttctctctcaagaaggcctttctacaaaacagctaagaacctctccaccctgtttcactgtcacagaggagtaaaatggctctgtccctacaggcaacatatcaacatatctagcacaatgtttgctcacaaacacagaactaattataagaaatgtgaaagaacctgaaacgcagggggaatactcttactggagacagcctccatagtggtagaaaacatagtagatctggtgttgaaagcccctggaggggtgatgggtcacttactagctatgtggcttaatgcaagtcacagaggcaaattactgagaaccaagctagggtcggatcagctctaaagtaccttttcagggccaggcacagttgctcatgcttgtaatcccggcacttttggaggccaagatgggaggatcacttgagccaaggaatttgagaccagcgtgggcaacatagtgagaacctgtctaaaaaaaaaaataataataatatatatatatatatatatatagtgtgtgtgtgtgtatatatatatatatatttgcctattcatctatctatagatagataaataaatagatatatatcaaaaaaagaaaattggctaggcatggcggttatgtgtctgtagtcctggcaacttgggaggctgaggtgggaggatcacttgagcccaggagtttggggttacagtgagctatgatcatgccactgcactctagcctgggcaacagagtgagaccctgtctctaaaaaaataaaataaagtacctttccacttccaaaaattcccatgattctttccacaggataccattctcaacaacaaatcttgtagtagaacttgtctcctcagaatctggtcaaaacatcactagttagggtgttctttcaaaaaaaatagcaaatctcctagaaacaggcacattgtgtgttaccctattaggacccatccccaaagcgaggcacatgtgggtgcttcattaatactctgttgaaaggaggaggtccttggaaactggtagtaccaacttagcatggcatacaatgaaaggtgattggagccacactcgaggaactacaaggcagcttttcataaataaaagccacaaaatgcaatttataactacatctgtctaaacagactaaagaaaagtagctttctatacctaggtcttcaccccttctcctccccacctctctactttatcatccctgtcctacacagcactgagacccgtctttctggttccaggtccacttttcctttttccacaccagaatgcctttaatcactgatagaaatgaacaaacatgaatatgagttctaaacaggaagacagatagcctcaagaaccaacttgtcaatatgttactaataagtgaaataagtgggaatggtgtctaacatgggcatgataaaataaaaccctaaaatacatactgtgctagggatttgaacaaacttcaggatttttaaggaaggctgtgtctcacatctcaattaatcttcccaaaagaaccctaagaggcaaggtttattccaattttataaattaggaacgtaaggctcagtaaaaagaaaatacctgcctcaaggtcgactggtaaggctgcagagccagaactcaaagagatgtcttctaaatccagtgctctctccagcacatctcagctacatcctctatctttctcatcagtataggtcttcatgtatacaaagcatttctgcattcattgttcacactgcttctgccacagctcatgaaaaggacaatgcagatgtctaaatggcaccagatctatacccaccttttttttttttttttttttgagacagggtcttgctctgtcacccaggctggagtgcagtggcataatcatagctcgctgcaacctcaaacttctgggctcaagtgatcctcccgcctcagccttacaagtagctgctgctacaacaggcacgcgccaccacgcctggctatttttaatttttagtagcgatgaagtctcgctatgttgcctaggctggtctcaaacacctgggctcaagcgatctgcctgcattgacctcccaaagtgttggaattaaacggtgtgagccaccgtgctgtcctatccacacttttaaagatgctaataaataacgtgatcaccatcagagaaaataaatcctacgtatctggcatcactgagaagtacaaaatttcacacaagcaattttcctactaactgaaatttatcccttttaaggcaaagctctttctttatatcaaaacatattctccaaaatacataagatatgttactctttacttagaattaatgaaatttaatcagggatattcgactataaacatgatataaacatcctacatactgtgctaggaattcaaagatttttttttttttttttgagacaaggtctcactctgctgcccaggctggagtgcagtggtgcaatctcagctcactgcaacctccacctcccaggctcaagtgatcctccctacctcagcctcccaagtagctggggctaccggtgtgcaggaccatgcccagctagttttgtactttttgtagagatggagttttgccatttgcccaagctggtctcaaactcttgagctcaagcgatcagcccaccttggcctcccaaagtgctgggattacaagtgtgagccactgtgcctggcccaagggtaaatctttaaacttgagtttataatcttgtagaggaagagacacatctgtaaccataatatgaagccaaagaacatgggcttggggtgtgctgaaaggaaggtaagataacacaagcaaggctagtggggaccaacaacccagggtgacttactgaagagaagtgggaggcactgaaaagtcctgggcaggagaatggtatactacttgtgctttttgaaaagatgactctagcacaacagtgaggccagaggcagaaaatggacttaggtggcagcgacagaggtagagagaaaactgcactgccagggcaggggcagtaggaactaaaacaggtggctctgaaaggcattacagacgtagagacaatgctcttagcatataggggcgtgggaaaggtggggagctaaagagaacactaagattcttgctttcatggaaagatttcagaacgagaaaataagagtaggtactggtttaaaggagcgtgagggactaactcaggatgggatgatggggaatgctttatagaggaagtgacatttaagctagatattaaaatatgagcaggataagtagagtttcaccaaaaagtaaaaaagcattctaggcagagaaaacagcacatgcaaagacagaccatattacagttgaacaatggcatgcagttttagggaggtgcatcagatgataagaagggtaataagtaaggccaggggcggtggctcacgcctgtaatcccagcactttgggaggccaaggcaggtggatcatgaggtcaggagattgagaccatcctggccaacatggtgaaaccccgtctctactaaaaacacaaaaattagctgggtgtggtcacatgcctgtaatcccagctactcaggaggctgaggcaggagaatcatttgaacccaggaggtggaggttgcagtgagccgagatcatgccactgcactccagtctggtgtgctccagtcagagcaagactccatctcaaaaaaaaaaacaagggtaagtaatattaaattgtgaggcacttgcctcatactaagaaattgtaggtgatgagaagacaatcaaggtttctaaaggaagagggtaaaggggagcagcatgatcagggctatgtttcagaagggaaactgtataaagtacagactggaatggtaagacacaggaggaaggcaatagagcataatggctaagattacaaggtctgaacttaagacaacctaatacaaattctgggtttatagcttaatagctctgcaaccttgggcaagttatttactctctctgtgccctcattttccccagctgtaaaatgggaataataatagtactttatcaggcacaagccaccacacctggctattttatttttaatttttgtagagacaggatcttgctatgttgtccaagctggtctcgaactcctcaactaaagtgaagctcccaccttgtcctcccagagcactgggataacaggtatgagccactgtgcccagcccatagttcctaattacgcctttttgtattttattaatttatctttctcttactgccttaagttccatgaaatcacaaactgtgtgctcaccgctgaattcttagaaatcagcacaatggctggcacagcatgagtgcttgataaatacttcttgaatgaatgaaaggttccaaactatatattttaaatgaactctatttaaatgtaacctttatatagaaccccaggacacacagaagaagacagtttgaagtaagggatatttggagacttgttccctctgcttccccctggttcttaagtcagttctatagttctgtaaagctttacagaatgcagtgcaaaaaccattgtctgttacaagcaagaagtaatgtatgtctgaagtaaggcaatgacaataaagatgcaacaatagctttgagaactatttatgacaggccctgacaaccaattacagtaggccctctgtatccatgggttccacatgtgtggattcaaccaacctgagatgaaaaacattttagggaaaaaaaagcatctgtactgaagatgtataaacttttttttcttgtcattattctaaacaatacaatgtaacaactatttacatagtatttacattgcattatataagtaatccaaggatgatttaaactatacgaaggacgtgtgaaggttatatgctaatattataccattttatatagagacttgagcatccaaggattttggtatctgtgtgaagtcctggaaccaatccccacagatgctgagggacaactgtataaatgaagaatgagaaaaggaaaattcttgaagcacctctaaatttcctagcttgagtgaacaaataaatgaacatgtgtgccaaaaagcaagataagaatgtaagagtggctgggcacggtggctcacgtttgtaatcccagcactttggcaggtcaaggcaggtggatcgcttgaggccaggagttcgagaccagcctggccaacatggtgaaaccctgtctccactaaaaatacaaaaaaattagccgggcacggtggcaggcacctgtaatcccagctacgagggaggctgaggcaggagaattgctcaaacccaggaggtggaggttgcagttagccaagatcacacaattgcaatccaccctgggaaacaagagcaaaactccatctcaaaaaaaaaaaaaatgtaagagtaacaataacaatttccattcatttgaacatagtatcacccctatcaagcaaatactattaataccctcaagttatagaataaatctttcacgatgttaagcaactgtcatgatcttcattagcaaagatcatgaggctaataagtagcagaattaagtttcaaatccaagactgtcccactccaagcccaaaatctaaaccgtcttgctatattggcaagcagtttgagagttaggtcttagacgtgagatatctactggatatacagttagaaataatcagtaactaatgaaaaatatgatttggggttagagataaggatctgggctccatttggaagactgaataaattcagaagagtgtctatgagaagatcatgcttgcttgtaaggcctgtaaatgggtgatgtacgcatttgcgattgaagtttgttgatttaccaaggtctctgccttgcatagatctagtgggcatcagcattaagagaggaagtaaaaaactttaggagaaattccagatctctggggattcctgttaggacctttatattatttttgttttgggagaatttaacagaaagacagtgacaccaatgtcaacaaaaaaaaatgagacagcaaaggtgataaagagaatagatttggggatcatcattttctcttctgcttgagattccacagctctcaacaaaaatgactattatttgtgtatggctctttacaactaacaaagtgtttcccatttacaaggtatttcctgtttaccaataatgtcagatgaaccttacaacagctgtttaaggtgagggcattattattttcactttaccaaagaggaatgaagtccagaaaagttaagtttaccttgtctaaggtcatacagctaaaaagcaaccgggccacgatgtaaccacggttttctggctcctaatctggggctctttccagaagactcacctgagataacatgagccactcacttatgaaccaagagtcatcatccctatgtatagtttcactgtgtttaaaaataaaacaatagggggatagtgactgggaaggggctaatggtatgctggtaatgttctgtttcttgatgtaggtgctagtaacacaggtgtgttcaccttgtggaaagtccttgagctgtaaactttgtgtacttttctgtatatatgtcatactgtaattattaaataccaggcaagccaggtcaggaggcttgcacttgtaatcccaatggctcaggaggctgagatgggaggatcacttgagcccaggaattcaagaccagcctgggtgacaaagcaagacccccatctctcaaaaaaaaaaaaaattcagctgggcgcggaagcttacacctgtaatcttagcactttgagaggccgaggcagacagattacctgaggccaggagttcgagatcagcctgaccaacatggtaaaaccacatctctactaaaaatacacatacacacacacacacacacacacacacacacacaattagccaggtgtggtggtgcacgcctataatcccagctactcagaaggctgaggcacaagaattgcttgaacctggaaggtggaggctgcagtgagctgagatcataccagttcactccagcctgggtgacagagtgagactctgtctcaagagaaacaacaacaaataaaaaaaaattagccaggtatggtggcatgcctgaagtctcagctactcaggaggctaaggcaggaggatcacttgagctcaggagtttgaggcttcagtgagctacgattgtgccactgtaccccagcctgagtgacgcagcaagatcccatctctctttttttttttttgagttggagttttactcttgttgcccaggctagagtgcagtggtgtgatcttggctcattgcaacctccgccttccagtttcaagcgattctcctgcctcaacctgccaagtagctgggattccaggtgtctaccaccacccccagctaatttttgtatttttagtagggacagggttttactatgttggccaggctggtcttgaactcctcaccttgtgatccgcctgcctcagcctcccaaagtgctgggattactggcatgagccatcgcgcctgaccaagatcccatctctttaaaaaaaaaaaaaaaaaaaaaaaaaggcaagccaaactgataatcaaaactcaggaacactaagttggatgcgtcacattttttactcaatttctcaaacagtagctacatataggacatctaccagttatataaggatgtacaaaattcttgcacactcaaataacatatccacccaattgtcccaatccagactgtcttagtgatgtgaaagaatctgacaggactggaagtaacagaagcccaggaaagggcggagatttttgttaatgaaaacaaaaatggcattgaaaatggaactatcctacatcatcatcaatgatgagatatctcaatttcagagataacaaaaatgtgaaaaaaaaatggccagtgacaattggaagatactatcaattgtaaaatacaccccaatttcagtgttaaaatattaaaaaagcaaaaaaaaaaaaaagaaagaaagcattttaaaacaaaggaaatatattctaatctcaaaaggtagctcaattgtgggataacagatttgtgaagcacatctccttgtacaagctctttgttttagagataaggacactaaagccttcatttaagttattaaataaccttactaaattaaagctcacacatcagaaagttgataactacaattacaaagctggttccttcaatgctcgttctcctgccactacccagatgcctcctttaaatccaaaagaagatttacatattaattccatattaaaactctattttgactttcatatttctttacttcattaactcactaaaaaataataaaagttaacctttaaaaatcaattaaagctgggcgaggtggctcatgcctataatcccagcactttggaaggctgaggcaggtggatcacttgaggtcaggagttccagaccagcctggccaacatggtgaaaccccatctctactaaaaatacaaaaatcagttgggcatggtggcaggcgcctgtattcccagctacttgggaggctgaggcatgagaattgcttgaacccgggaggtggaggttgcagtgagccaagattgcaccactgtactccagcctaagaaacagagcgagacaccgtctcaaaaaaaaacaaaaaaaaacaaaaaacaaaaaaacaaaaaactaagctgggtgcggtggctcacgcctgtaatcccagcactttgggaggctgaggcaggtggatcgcctgagggcaggagtttgagaacagcctggccaacatagtgaaaccctgtctctattaaaaaaaaaaaaaaatagctaggcgtggtagcaggcgcctgtaatcccagctactagggaggctgaggcagaagaatcacttgaacccaggaggtggaggttgcagtgagccaagattgtgccactgcattacagcctgggcaacaagagcaaaactacatctcaaaaaaaaacataataataattaattaagatgaaacgatgtttaggaaacttcatttcttgcttatacaagtttgttttccttgttcttcaaaaccagtgaagcaatacaaagttagataaaagacaaaattagtaatctcccagcccctttccattcctctccaaggcctcctacaagatgagaaatggtaacatatttttgtgtcccccaaaaacataaatacaaatatattggaaagggttttgttgttctctgtttttagaaaactaggtttaaactttacacattgctctgcaacttatctcatctaacaatttatcaacatctccccaagcatcaataactaaaattctaactcatacttttaaaaagctacataaaagtccatataagggatatccataacgtgttcacatatttttctattgagggaatggctattttcagtgttaccatttcaaacaatgctgtaatgagtatccttgacgtatttcaagttaaagaaaaaaaactatttctacacacatactttccttgttgtcccatgttttgattactcctggtctcatcatcatccctacctcccttgctcagagaatcatcctcagggtccagtgtgatgacagagagcaaagtaacttggagaatgtcaagacaagacatgtgatagttactgttggtaaattggaaatggcctgtcttggctgcctctctcagtcacttgcacatgctatccccctcctccccttacatgtgctccctgttctggtctcagcagctgcttccaactcaactgatgtgagcacagctagctaccttgtcacactcctaatcctggcaagtgcagacaggcccaggagctctccaaacaattggaaaggagaaggaatacattatcactgtgaaataatataatacggaggtatctagagtaaaatgtaaaactccctcttcattaagcctcaacccacatttgccagtgacactccccagctcagaagtgaccactgttagaagtctgttgtacaaccttttggatttttcctaagcatgtacacatacaggtatatattcacatacaggtatgtgtgtttggtctacatatctgtaatcataccatataatatgttctgcaacttgcccttttcatgtaaaaatttatttgacatgtttccataccagcaaaaaacagattcctcacatttttaattaattttttttgagacaaagtctcactctgtcacccaggctggagtgcagtggcaccatcatggctcactgcaacctcaaccacctgggctcaggtgatcctcccacctcagcctcctggtagctgggactaaaggtgcgcaccaccatacccagctaatttatttgtagagatgggatttcaccatgttgcccaaactgttctcaaactcctaggctcaaacaatccgcccaccttgtcctcccaaagtgctgggattacaggtgtgagctatcatggctggcaattccttaaacttttaaaagcttgaaaaaatcctatgtaagaatgtgccacaactttattttcccattttgctacatctggacatttaggttgttcacagtgttttgcatgtcaaagaatgctgtattgataacactggcagcacatctctaattttacacacaagctaatatttctctaggatatataccaataattagaattaatgggttgaaaagcttgtgtattttaaatgtcaacagatattcccaaattaccatctaaaactgtgtactagtttatagtctcaccaacagaggataaaaattcccatctacacccttctaccaatatattttatcaatatataagatagaatatattattgttttaatttatatcttatttccagaaaagttaaacatctcctcacatatgcaactgttcattcttatttcttatgaaaggtattaccattttgattttaaacatgagggttcagagatgctagagtgacacaaccagtaagtccagacatcaaagctgtttttttaacaatttcccatcaaaactaggcctctttctgtcaagtgtaattccccctaccagcagccagcaaactatggcctataagttagcagcccatattttgtaaatcaggttttactaaaacgtagccacgcccattcatttaagtattgtctatggctgcttttgttctccaatggcagaggtgagtagttacaaccacatggtctgcaaagcctaaaatatttactactggggtctaaacagaaacaataacttgcctaagcacagtgactcacacctgtaatcccagtgctttgggaggctgaaggtggtggactgcttgctgtttgagcccaggagttcgagaccaacctgggcaacatggcgagattccatctctacaaaaattagaaaaatagccagttgtggtggcatgcacctgtaatcccagatactcaggaggctgaggtgggaggactgcttgagcctgggaggccaaggccgtggtgaactgccattgtgccaccacattccagcctggaagacagagtgagactccatgtcgaaaaaacaaaacgcacacacacaaaaaaaacaagagttaaaaactaaagaaaagctcaggtctgggcacagtggctcatgcctgcaatcccagtacttaggaaggcttagcgagaccccatctctacaaaaaataaaaaaaattaggctaggcacggtagcccacacctgtaatcccagcattttgggaggccgaggcgggcggatcacgaggtcaggagaatcgagactgtcctggccaacatggtgaaaccccatctctactaaaaatacaaaaattagctggccgtggtggcgtgtgcctgtaatcccagctactcaggaggctgaggcaggagatcacttgaaccaaggagttggaggctgcagtgagccgagatcgtgccactgcactccagcctggcgacagagcaagactgtctaaaaaaatttaaaaaattaaaaattagccaggcacagtgctgtgtgcctgtagttccagctacttgggaggctgaggcaggaggaccccttgaaccaaggagttcgaggttgcagtgagctatgatcacaccacggcactccaaaatctgggtgatagagcaagaccctgtctcaaaacaaaaaaagaaaagcttctcagtggggattagttatggtctaattggccacagccagagcatggctatgttacagtgtgtggctcattttcaaataactttatatgcagtataggtctggtatataatcccaaaggaaagagcccaaaacactcaaatgaagtcaaaagacttatctttacttatgggttgcaacactaaaagattttctatgcactactcttcgtcttccttgtttcttttctttttttttttttttttttttttgagacagagcctcattctgttgcccaggctggagtgcagcggtacaatcacagtttaccacagcctcaacctcccaggctcaagcgatcctccttcctcagactcctgagtagctgggaccacaggcaggtaccaccacacctggctaatttttgtattttttgtagagacagggccttgtcatgttgcctaagctcatctcaaactcctgggctcaagtaatcctgcctctgcctcccaaagtgctgggattataggcatgagccaccatgcctggccccttatttaatttcatctggttcctactgtccttcaatgattttgacaatgtagttcctacccacacaccacaataatacaaaaccaaagcaaactccactatgtctgctgctaaacacccccaacaaacacacatacacatcacaccacaccacacaacacaacacaggtgtctccttcccttttgctagcagattcgctaggaagcagctgcacatttccagcaagtcgaacaaactgctgagagctagggcccctgaccattgtgggaaaggaaggccaattctcccctctagattgtacccttctgaagatcctggccatgaaagaagtcatttctccagagaattttaagccattcagttcctatacggcaggcaggaaaggtgtcatcctccccatatcatcagtggaggaactcagtgtaacttgtttcatttcctcttacttcaaaaggtcattttaagtaatagggtcatttaggtaatatcagtgatctttttaatttctcctcgcattctctcccaaattttggttttacaaaataatggttaaaaaaaaaaagctatcatactctccacgaaatttaacttaatctagaattttgaatgagaaattaataatcaaagaacagtgcattttaggccaggcgcggtggctcactcctgtaatcccagcactttgggaggccaaggcgagcagatcacctgaggtcaggagtttgagaccagcctggccaacatggtgaaaccccatctctacttaaaatacaaaaaagtagctgggtgtggtggtacgcacctgtaatcccagctacttgggaggctgaggcaggagaatcgcttgaacctgggaggtggaggttgcagtgagccgagatcgtgccattgcactccagactgggggacaagagtgagacttcgtctcaaaaaacaaacaaagaacagtgcattttcttacacaaataagcaggtattaagtggttctctggataggaatttggcaatacaaatcaaaattaatgcctataatcctagcactttgggaggccaaggtgggcggatcacctgaggtcaagagtttgaaaccagcctgaccaacatggagaaacccgtcttaaaaaaatacaaaattagctgggcgtggtggcacatgcctgtcatcctagctactcgggaggctgaggcaggagaatcacttgaacctggaacaggtggaggttgcagtgagctgagattgtgccattgcactccagcctgggcaacaagagcgaaactccatctcaaaaacaaaacaaaaccttgatatttgggccaggtgtggtggtggcacatgcccaaaatcccagcactttgggaggctgaggtgaaaggattgcttgagcccaggagttcaagaccagcctgggcaacatagtgagacctcatctctacaaaaaataaaaaattagccaggcatggtggtgcacacctgtggtcccagttactcgggaggctgatgtgagaggatcacttgaaccctgaaaggttgaggctgtggtgagctgtgatcataccactgcactctagcctgggtgacagagtgagaccctgtctcaaaacaaagaaacaaagaaacaaaaatgttcatatttggctgggtatggtggctcacacctgcactttgagaggccgaggcaggatgatctcttgaagtcaggagttcaagaccagcaatcttctcgcctcagcctcccaaagtgctggtgctaggatgatgggtgtgagccactgcacccagcctaagatagtaaattttgttacatacatcttaccaaaactcaaaaaaaaaaaaaaaaaaaaaaagctggctgggtacaatggttgaagcctgtcatcccagcactttgggaggccaaggtaggaggattgcttgagcccaggagttcaagaccagcctgggcaacacagtgagaccatgtctctacaaaaaatttaaaaattagccaggtgtggtggcatacacctatagtcccagctactcaggaggctaaggtgggaggatcacttgagtctgagcctgggaggctgaagccataataagctgtgatcataccactgcactctagcctgggcaacagagtgagatcttgtgtcaaaaaaaaaaaaaaaagaaacaaaaagaattaaaaaaaaaaaaatctcatgttctttcatcaaataattccaatcacagaaataaaagtttaggaaataatctgaaatacaaagatatatggacattaatagaattatttatcattctgaaaaactgaaggaaaactaaatatctaacaataacttaaattatggcaagaatatacatatgatgaaatcttatgcagtcacttaaaatgttttaaataagtttggctgggtacagtggctcacgtctataattccagcactttggaaggctgaggtgggatgattgcttaagcccaggagttcaagaccagcctgggcaacatagtagactccacttctacaaaaaataaaaataaaaaaaatagctgggcatgatggcatgcgcctgtagttcagctacttgggaagctaaagcgggaagatcacttgagcccaggaggtcaaggctgcagtgagctaggattgcaactgtaccactgcactccagcctgagtgacagagcaaggccccgtctctggggaaaaaaaaaaaagttttaaataattttaatgacatggggaaatactcaagaaatgttgaattttaaaagcaggatataggctgggtgcagtggcatatgcctgtaatcccagccctttgggaggccaaggcaggtgaatcgcttgggctcaggagttcaagaccagcctgggcaacatggtgaaaccctgcctctacaaaaaatacaaaaattagccgggcatggtggcatgcacctgtagtcctagctatttgggaggctgaggtaggaggattgcttgagcccagaaggttgaggctgcagtgagctgtgatcgtaccactgcactgaagcctgggtgagagagtgagaccctgtctcaaaacaaacaaacaaaaaaaaggcaggataaaactattatggtatggccccatttttgaaactatatatacaaatatttatagacagatagatatatcatatacatatttatccctctccccacatacttgtgagtttgtatatgtgtatgtatacgtgtaaggaagtataccaaataatgttcatttctgagttgtggaattatgggtgccttttactttcccccttaacacattatttttcatgttttctaaatagtaccatcatatacaattaggaaaaaattactttcatattgtttaatctagtaatctatttgtagatatgtatcataagaaaataaccaaaaacgtagacaaaaacttatgcataataatgttcatataaagatacacagaaaactattaataaataatggttacttctgcagggcagaattagggtaaagacttatttggggacttatttgttatatctattacaaaaatgatttgaaaaaaattccattattatttgaaaaaacctgaaagcatataaaaatcctatatgatagactattatgcagccactacaaatatttatgaagagtatatataaatttatataatgaaaaaatggtaaatggggaaaaaagcagaatataaaattttaggtaatatatgatctggaaattgcaaaaccagaaatatacaagcacaaaatactgaaagaaaataggctaaaataagaacagtagttttctccagatagtgggattacgggtgatttcagttttcttccttatacttctctgcgtttttcacatatcctagaatgaatatatactatttttcaatcaggcttaaaaaatgtttttggtttctgccctataatgaaaagcctgctccttgtgtgaaattttatccacaaaggattatcagtagtaagcaacccactagcaagaagactgttcataatgtatatgcctaagaaaatcatctttggtgggtcagtgagctcagtttaaagggacacagctctgaccacttcctgccttcttgcttttggagttgttttagtaaatataactgaggaatcaagttctcaaacatgagatgcctgacaaacttaatactgtactgtaagaaccaggaccaccaccttctctcaacctaacctctaagactttacacttaagaatagacaagaccgggccgggcgtggtggctcatgcctgtaatcccagcactttgggaggccgaggtgggcggattacctgaggtcaggagtttgagaccagcctgaccaacatggagaaaccccatctctactaaaaatacaaaaattagccgggcgtggtggcacatgcctgtattcccagctactcgggaggctgaggcaggagaatcgcttgaacccaggaggcgggggttgcggtgagccgagatcacgcctatagcctgggcaacaagagcgaaactctgctcaagaaaaaaaaaaaaaaagaatagacaggacctaaataacatagattgggtcatgttagtctgtaaatcaaaaacacttaacagctaattacatgaagaataaaatccaaatttcttagcataacgcttaaggttctctaagatccaaccctcaaatttccttcccagcctcatcttcagttcattccctaaaatatcctctacctcaggcacattttccccatacatgccaggcattttccaagctgtgtgcctttgcccatggtgtgacctccattaaatgccctgtctcctaaacctactgaactcctattcttcctttacaacctggctcaaatgccttctcccaaactctccttatcgcccccaccatcaggaacaattgttctttcctctatgtgctcccatattgcttgttcctctacaaacttaattacaatcctccctgggtggatgctagctgtaatacttgtttcattttactaaactcctggagggcagaaaccattttaaaatcatttccactccagcacactgcttgcacacagtaggtactaaatatgctgcctgagtaaatgacagccaattggcccttatctgaattctttcagtggtacagccagggatggcaaattgtcaaagctagtccctctaattgcaagttatacatatagcatgagtgaccagcagaaaatgccaagggcctgccactttaagaggactggcaagatgactatgtttacacaatcctaattaaaactaaagggcaatgagggaaagaagagaaatagggagattaagaggtgtggattctacaggtcacctcctcttcttagtgagcttgctaggcactaggctggaagatctgagctacaaagtagcctattttatctttggggtagcctgtaggatctaagtattgaaaagcaactaattaggccactttgtcctccagcaactggccctgctcttgggcattaacttccaactggtacacaaggctttttctctaaatgaatcccactgtaccaatcactaggagaatccctttaaaaaaggcttgaaattaataacagcaggaaacaaagtctctcaatcctctgaatcacaatatccacactgtccattttgatgaaattcacccccacctccttcaaacaataggtcctaccaaggaatgacttctctcaggaccaacatgtcctgtgattgtttttctggagcaagcttccagtgcctgcttctcattaaatagctacttaatgtctgatcacccagctgtgactataagtagagagtaaagtaactataatttaggaagtaaaaaagaaattccactcctaccccaagtccagtagtcaaacagcttagaatagacatttccctacctcaaaccttcttaggcttatccaattttcagatctagaatttttagcatctcttaactctttcaatataaaaatgaggaaaacaatgtttagagtaagaaagagaattgcaaatgattatacagtaacttagtcacagaatcttttgaccaggctgtctaacacctcatttaactgatgagttttcaagaccactgtttccaggaacaggttacagggcactacaatataatcagcttaatttgcatatattcaagataacagcccctaggcttgaccccttcaccatcttcctgcctaccttttttcaaacccacaactgctaacaacaacaaaaaaatcaatgtagtgatttaatacatcatttctgcctaaaaaaagactggagctaccaaaccatctgcttcagcctcaccacctgggattcatcttgattgatttgggtgtgttggtgggcagtggctgccacagcctgaagaactcttccaactctttctgggggtcttctggagatgggactgcaatggctcctcagctgcagtttcctatagagcaacatgttgaaacacacttgttccctcaacacacttgtgtttcagccctcaacacacttgtgatttgggaggagtaccaggagaaagaccagtttttggcagggcgcggtggctcacgcctgtaatcctagcactttgggcggccaaggcgggtggatcgcttgaggtcaggagttcaagaccagcctgaccaacatggtgaaaccctgtctctactaaaaatacaaaaaattagctgggcatggtggcacatgcctgtaatcatagctactagggaggctgaggcaggagaatcgcttgaacccgagaggtggaggttgcagtgagctgagatcccgccattgcactccagtctgggtgacagagagagaccctgtctggaaaaaaaaaagaaaagaaaggccagttttctccattatctagtcaccccaacctataagcaagcatatgcacagtcactataaaggaaagtgacttgttttccagcagacatttctaatcttattaaatcaaatgaaaactgcaatcaaaatactctccttaggaagttatttacttattctaacaaaacacttctttgggagctgcctttaaagtctactccatgtgagacaaacagaaaaattcggtgttactgttttatagtcacacctcatccttcaccaaaaaaggtattgccttgcatgaatctttggctcacggcatcttctggctgtttctaaaaattgaatccaccaagctaagagtaaagatttgctacctctgaggatattcaaaagattggctcagaggcagtctgaggcaatgacaccatcaccaaaggaaatctaaaggctgagaacacaattactttgaaggggtcaaacttaaaaacattctaattgccccataattacaatcaagggggcaagacatgtacaatatctgtcacatttgttcaactattatatcactttataattacacattatataatgataaattttggccctggaagaaatcttcaagatcatataatcctaactgtccctttttacatatgagaaaagttcagtccattgaggttaggcaatttgtccctggtcacacatctggttagcaacagtcaggatgagaaacccagacacccaaactcccagcataatgcacccacacatacttatgtatacagctcctcctcccctgcttctcacttccttcactcccctgatcaaaagggacagaaataacttgggacactaaagcacaccaagaatggttctgaaacccagtagcagagaaatgatggcttaaaaaccaggacttctctgcagtggcctcaatggccaatgtttagtgtctggctcacaagagttctgggcaatctacctcagagcaagggccaatgaaaacctctggacaccaccctcccacagttagaaaaatatctttattaaacctctctgctctcctcctacagtaacctgtttgcctcaaataattgaaagacaaagacaatcactttgaagaatctgggtcagggaaaaagtaaatggtagagatcctgctcaggacaaagctgacctatgaaaaactagagggcagaaaccattttgacttacctcctggtggaagcctccacacactagaacagggtgatctccagcagtctggcttagaattagtttccacctagggaaggggcaaagggacaggaatgattattcattcccctaacccacccactcttagtgagctcagcctcacattatcctgggcaaccccagcgttctgtggatcagacagcaagcagaagggaagccatgcaggccaggtcaacggggtgagtcagtggcagagcaggaagagtcactggggcagaaattctggccttctgtggcaagactgccaagccacacccacacttggtcagcactgtgaaggccctgccctgttaggatttcagtctttaagccagaaaacttcttcctcaggaggccccacaccactctcattttcaagtgtctctcctcctgctcaaaaatcttccagttttcttctccctaaagcatcatatctaaattctttggcttaactttccaaatcctccattatatggcctcaagtcatttattcaaccttatttcccactattctacagaatatactctgaattgatcaagccagtcttcccacttctctctgcgtgagccaagccttttctcatttccctgctttcaattatccaggagtggtaaattcaaacatcttcaggggtcaggcaggtaacagaaacaaattatccaggcaaggcccagtggctcacagcggtaatcccagcactttgggaagccaaggtgggcagatcgcttgagctcaggagttccagaccaacctgggcaacatagtaaaactccgtctctacaaaaatacaaaaaattagctaggtgtggtggagtgtgcctgggtcccacccacttgggaggctgcagtgagctgagaccgtgccactggactccagcctgggcaacagagcgaaaccacgtatccaaacaaaacaaaatgaatgatccagtggggcacatggcagatctaggaaacgctgcacccccctaaaggcattcaaatattttaattcaaatatttatgtagtgtctcactgtgagcatcacgataaccttttaaatagttattaatactctatcttgcaaatgagaaaacttccccaaggttaggtaactggcaaaatgctgggcacagtctctagacctgtctgatgccaaagcaagagctctacaccattaggcttctagcagtgcaaacaccatggaagatacagaaccctcaaagtcacttttcatgatacacaaccttaatagtaggatgggaagcccaaatcacagcttatctaaccatatcccaactgcctccaattctgttcattttccaaaccccatctttctgccaaagtatttcattcctagttatccaagtcctactgaattccttcttctgtaaattcctatagggtttatagattagacaacacaaataagtgctaaattatatactgtcttgcaaaatcagatactgcttctatgtattttagtgtcagcctcatcaatcaaactattgtattaatctatatagttcttctaccaaaaatgcctaacctgaatctaatcaagaagaatcagacaaatgctatgaaagacaaaaaggcattcagattaaaaaagaactgttcaaagttaaagcagactaaagacatgatagtcatgacaactaagtgcataaatacatgcatgatccttcaatgaatcctgaattttaaaaaactcaataaaagacatcactgggaaaagatgagaaatctgaacaagtattatatactggatgtattgaatcaatgttaagtttcctgagtgttaatagtactgtagttatataggaagatacctttttcttaggaaatacttgctgaaatagggattaaataacatgatatttacatctaacagtcaaaaagattcagaaaatgaaggataaatagacagcaaatttggcaaaatgttaatagtgactctaaatgagaagtatataagtatttgttacattattttgcaaaatatctataggtttgaaaattttcaaaataaaataatttagtaaggagggaaatcctgtattatatacttttttatatactcagctctgtgacagatataataggcactcattactttaggtatctgctcactacctaaggaaactgggcatttggaggtcagcaatcagacagagtccactttgctgcagctcatgaggggtatagtaggaaattcttagggaataagaggtttctccaaaactcacattgtcacaccacaggaaatctagaaaagcaggcaattacctcactcctcattgaggccatcacagaagtacaggcactgaacaaatgcccactcgctaggcagaatgcagctgctgcccacacgttagtacccagtggtaaggtggatacaatgtgacctcagaggaccaagagttgaggtcacattgcatccaccttgccaccgggtaccaaaaatttgacaatctgcaaaacaagtgtctctggccagtcacaggaaggcactcaagtatcaaataaacatgcctgaaatatatgcagtctttcctcctcaccagataaaccagtcctcagctgcaataaggcagaagaaatctgcaaggctgaatcactggtatttcctgtgcagacttcaaagaaactggcccttcaataggacagaaagggcaggcgacacagctgccaacagaggcctcaacccaggagcatgctatgcaataatgccttctctcccttctacagccatcagatacctcatttttacttctgccaaatggccccttattaccgcgactgattacctaatagccaaccctttaccttggttctctcctcccctcaatgagacccaagatactggcctttctagacagctcctcctccaatttgccagaggaattgtcaaaactattcccctggccaggcacggtggctcacgcctgtaatcccagcactttgggaggccaaggcgggcggatcacactgtcaggagatagagaccacggtgaaaccccgtctctactaaagatacaaaaaattagctgggcgcggtggcgggtgcctgtagtcccagctactcgggaggggaggctgaggcaggagaatggcgtgaacctgggaggcggagcttgcagtgagccgagatcgcgccactgcactcaagcctgggtgacacagagcgagactccgtctcaaaaaaaaaaaaaaaaaaaagctgcctaggccaggcacaatggcttacacccataaacctagcactttgcgaggccgaggcaggaggattgcttgagctcaggtgttcaagactagcctgagcaacacagcaagaccttgtctctactaaaaatcaaaaaaattagccgggtgtagtcccagctacactacttaggaggctgaggtgggaagacagccactgcactccagcctgggtgacagagcgagaccctgtctcaaaaaaaaaaaaaaaaaagttgcccacagtaggaggtagaggagaggccattattaagcacactctcagtaaaccatgaatctgacagagctacccaaaacatcaatgcagtcttaagctgcattagtagaagatgactctatgccccacctttgaagagcaaagttagaggacttgcagaggaagaacaccaatgaccatggcaaagggtctagaagtatatcatttcaaatatggaggaagaactacacacttttagccaggggagaacaagaaaacttttttcaaatatacgcatagctttcacatagatgaggagaaagacttatgagtccactataagaatacaaaaccagaactaatgagtggaagttacaggaagactgattttggtttgccacagggaagaaatttcagcatgttgtagaagttcagaatgtgggatgtagaacccagaatgcttggattaggatgtcaactccaccacttataaactgtgtggctttggggagattaatctacctgtgcctcagttgccttccctgtaaaagagaatagtaataatagaacttagctcacagagctttaagaagtagcttccgaggctggctgcggtggatcaggcctgtaatcccagcactttgggaggctgaggcaggtggatcacctgaggtcaggagttcaagaccagactggccaacatggggaaacccgtctctactaaaaatacaaaaaaaattagctaggcttggtggcgcatgcctgtaatcccagctactcaggaggataaggcaggagaatcgcttgaacccaggaggcagaggttgcagtgagccaagatcacgccattgcactccagcctgggcaccaggagcgaaactccatctcaaaaaaaattaaccagacggtagtggtgtgcgcctgtaatcccagttactcgggaggctgaggcaggagaatcatttgaacctgggaggtggaagttgcagtgagcagaaatcacaccactgtactccagtctgggtgatagagagaggctccatctcaaaaaaaataaaaagaagtagtttctgtaaagtacttagaacagtgcctagttcacaatatacgctggaaaaaaaatgttacctattgctattactaaatgttgatacaacagaccaggctgggtgtggtggtttgtgcttgtaatcccagcactttgagagaactgcttgagctcaagagtttgagaccagcctgggcaacatagtgagacctcgtctctactaaaaataaaaagagttgccaggcacagtggcgtgcacttgtagttccagctactcagcaggctgaggtgggaggatagcttgagtccaggagatcgaggctgcagtgagctatgatgacgccactgcactccagccagagtgacagagcaagactctgtctcaaaataacaaacaggctgggtgcaatggctcacgcctgtaatcccagcactttgggaggctgaggcgggtggatcacctgaggtcaggagttcgagaccagcctgggcaacatggtcaaaccctgtctctactaaaaatacaaaaattagctggttgcagtggcacgtgcctgtaatcccagctacttgggaggctgagacaggagaatcacttgagcccgagaggcggaggttgcagtgagccaagactgtgcaattgcactccagcctgggcgacagagtgagactccatctcaaaataaataaataaataaataaataaataaaataaaaataatatacaatacaaaaaacagaccagataacctgaagcccttcctactaaatatgcctagaagtgctcagaaaaatataataaacatccttctagactgtgccagctattaaggtattgtctctcagctccaaatctaccctgttatgctccgctttgtgatgctggggcctggactccactaaaccccatttcacatttgccagctggatccctgtcaacagggggtgctaaggggaaaacagaagacaagagaaggctacaagggacttcctccttcttgtagcctggtgtttcttgacaacagaagttggttcttcccagttgccttctaaactcccaaaaccagcctcctgcccctcaaaggcaccagcatcagctaagtaaggctcaacagaagccagctcctccaggttcctcctataagggcctgagaaaccagcagcaccaggtaacaccctctccagagaatctgggtacagctattccagatccctctagacttctaggttctggtagccccaaccttcctccctttgtttttcagtcctggatgagaaaaattctttatgcagttattatattgaagttactttaatattccctttctgctttttcagccctccaccaagggtttaaatcaatctcctttatggagttcactctattgtgtggtttctgttttgctgattggatctgaactgacatatagataaactgagctctcaagaaagtaagaaaaatccccaggaaccagaaacaaattagtgaggaggattagcgagctgatgacatagctgtcctagccgtgtatggaatttgtaacaccctcataggttcagaagacagatcttgagtccacaaaaggcactgagatccctgtgcagaggctgagattcttaagtttatactcagtaagataatagactaggaaaaaaaatctgtccagagagaaataaaaaacttgccttgctcacctagtgagaaaggagggaaaaaccgtctaggaattcaaaacaggctgggtgaagtggctcacgccagtaatcccagcacattgggaggctgaggtgggtggattgcttgagcccaggagttcgagaccagcccgggcaacatggcaaaaccctgtctctacagaaaatataaaaatttgccgggtatggtggtgtgcacctgtagtcccagctacttgggaggctgaggtgggcggactgcttgagcccaggaggcagaggttgcagtgagccaagatcctgcaactgcactccaacctgggcaacaaagccagacagatcctatctcaaaaaataaaataaaataaaataaaattctaggaagcagacattaatatgtagtgaaaaacaaacaaacgatcagtggttcctggtatcagggtgaaaggaaaaacggactgtaaagaagtatgagagccgggcacggtggctcacgcctgtaatcccagcactttgggaggccgaggagggcagattacctgaggttggcagttcaagatcagcctgaccaacatggtgaaaccccatttctattaaaaatacaaaattagctgggcatggtggtgcatgcctgtaatcccagctactcaggaggctgaggcaggagaatcgcttgaacccaggaggcagaggttgcagggagccgagattgcaccactggactccagcctggagaataagagtaaaatccatcttaaaaaaaaaaaagcatgagaaatcttttgggggtgagagaaatcctctgtatcttgattatggctgctgtttacaggtgtagacatctgccaaaactcaactttcttgaaaattattacagacacaaaattgaaaacatgagacaaaaacaagatcacgaaaaacaagcagatttgaaaatgaaccaaagagcacttctaataaatgaaaaagttagctaataaaaataagaattcaaaaaacaaattagacctagctgaagagtaaactagtatactagaagatagatataaggaaattatccagaagttaacacagaaagatagaaatggaaattatgaaagaaagaataagatgtagacgacagaatgaggaagttcaacataagttacgcatgagatctgagagaggtaaagaggtaatgattgggaatttttacacaattagtgaaaagatatgaaatttcagattaaggaattactatatgcccccagtatatagtgatttaagaaaattaaattcacaccatgtaatggaagtacagaacacaaatgacagcaaagaagatcttaaaaacaaacagaaagaaagacaggttacccacaataaaataagttaatttgcaagcatagttctcaagagtaacaacaaaaagccagaatttcaatgaaaaaacactttcaaagtgctaagagacaataattggaagcctagtacccagctaaactaccaatcaagactgaaagtgagctgggcacagtggctcatgcctataatcccagcactctgagaggccgaggcgggaggatcacaaggtcaggggatcgagaccatcatggctaacacaatgaaaccctgtctctactaaaaatacaaaaaattagccaggcgtggttgcgggcgcctgtagtcccagctactcgggaggctgaggcaggagaatggtgtgaacctgggaggcggagcttgcagtgagccgagactgtgccactgcactccagcctgggcaacagagtgagactccatctcaaaaaaaaaaaaaaaacaaaaaactgaaagtgaaataaagattttttaaatgaagacagtgtttaccactaacagattcccactggacaaacatctgaaggatgtatgtatctatgcaataaaaaaggaaggaataaaatgcaaggaaaaatagtgaaaaagcaaacagtagacatacatgggtaaaatgaaataatcactaacaatacaaaacaataaacatattttaattgtgttggggtctcactctgttgcccaggctagctaagaactcctgggctcaagccattctcccgcctgctcctcctgcctcagcctccagagtagttgggatgacagggcaagccaccatgcccagctacaaaataataattatcaattagaattgttcagcttagagatggattgactttgggaatgatctcattctagaaagtactcattttgagtctggacaacaccttttggtatgtttagtgtacactgggtaagaggctaaattaaatgaccacaccatatattaggttaatgcaaaagtaactgtggtttttgccattactttcaatggcaataactgcaattacttttgcacaaacctaatatcttctgatcatagttttatcaattagacacagctgtccaaacagcccctgatcagctctgttcagccacctgagcagggctttgccctcatcctaaaagttctagaattcaagtcttatttcaaggcattcttcccacttccatgttccacatgtaaaaaagaattctacgtttcttaacgagctttcaggtaagatctttaagcttttggaatgtaccgcttttcgctgtgaactaagagcttagacattacaattagtcatcccttgctagaacttaggctacgaaaagaatactttggaagctttcacaaaaaagtatgtggttcttcctctaaagaagaaaataccacacagaaagagggactgaggaaacataaacccatctgtgctgacagaaagctaccttacatgatcctcatgttcgccccaggttcccatatattcacagcagtaaagatctccacaaagcagagaggcccaactcccttaccattaaagctttaacgaccagacaacccagaagtttggaaacatagaaccaggcaacagatactagagagagggaattatgtattaaagcaagaaaatatcatcacgttttcaagagggagtgccattccagtaaagaggacagcttaatactgaggttcaaatgccactaaatgaaaacgggaaagcgaaattcctgtgccctttcagcccaagaaattattccaaagcatacatttattcccattacatgtcgcaaatcctgcctagccattaggatacagtgacgaaaaagtctctcgttatctagaagggcagacaaacacgcagacttttaaaataccagatggcaggccgggcgtgatggctcacgcctgtaatcccaagcactttgggaagccgaggcgggcggatcacgaggtcaagagttcaagaccggcctggccaagatggtgaaaccctgtgtctactaaaaatacaaaagttagccgggtgtggtagcgggcgcctgtaatcccagctactcgggaggctgaggcagggaactgtttgaacccgggtggcagaggttgcagtgagccgagatcgcgccactgcactccggcctgggcgatagggcgagactccgtctcaaaaaaaaaaaaaaatgacaagtgctaactcagaggtaagcaaaagagagtacccagaggcggcagcatcaacccagtgggctcccgcccacccacaatcttcacacagtcacaccacttatagtcataaatttgtactctccgaggtgcgtgtatgaaacatgttatctgtgagagtccatggatgaaaaacaaaaacaaacaaaaattaaaaaaaaaaaaaaaaaagacttaacctgttttgaccaggacaaccaccccaggaagtaggtaaggcaggtaaggtcattgtttacatatatgaaaagtgaggctcaaaatacactgaccagtccaagacaacgcgcgcccccacaaagcaccttccccgtccccatttatgcccaacccataaacccaaagtagagccaacctcgcactggctacgtaacccgggccaagctaaacattataaacctcaggctccccatctttaaagtataacaggtggttagaagattaaaaagataaacatttggcaggtcattgtggacggtgtagctcagaaaatgctgactactgcactaccataactactgctattgttaacgataaaaggcaaagactttccaggacccgacccctcgcttacaagcctttcgggaacttgccctatacccccgaccccagtcaccttcagatttaattccacagacacgcccccaaacagaccctcccctttaaggcaccccccccccccccggctcctccctctcaggcgcctctcctcacaaaccttacccccatagattctgccctttcggactcggttatggaggaggccttccgctcgcagcggcctctccagcaccccttttaggcctgagcacccgcaggggtgcccaggccgcacgccaaacgcgggcccgcgccggttacctggctgcgcgctcccgctctgcctcgcgattctccggaatcgtacctcttcgtgggctcgcgccagcgctgtgagcgcacaattagtttaaactatggccccgccccctcgcgctgccctctgattggcctctgtcggcggggcccgcttaaggacccgggaaaaggaagtttgagggccactgggaaagagaaggggtatcaccgcttccggaccccggcctgtacttgaaggcaaagagaactacaaatcccagcgtcacccgcggccttgaagccccgcccctgacaaactgaaggtcccggtaagcatcgcgtcagtacttatggcgcctgccgggttgtggtgacgaaagcagttgccatggagttgctctgagtaaccctgaggcagtgggacgccaagactggagaggaagcgactgcgggtgagtcgggcgggaaaacaggaaacccgttctaggggacaagagatctatggagaagggaggggcactcacagaacgactaagaaccttcctgctcggggatctgagatttcccccaccgaccctcatcacctttcacagcgaacaagatacaacactcacatgggacagactgggcgagggggagcagagggagggataggcgttgagatatatatccatacagatttggggatgcttaagaaccacccccagggccgggagcggtggctcacgcctgtaatcccaacactgggagaccaaggcgggcggaccacttaaggccaggagttcgagaccagcctgagaaacatggcgaaccctgtctctaccaaaaacataaaaaaattagccgggcttggtggcgcgctccagtggccccagctactagggaggctgaggtagaaggatcgcttgagcccggagattgaagctgcagtgagccgtgatcacgcaactacactccagcctgggctatagagcgatacctccatctcaaaacaaaacaaaacgaaacaaaacaaaaacaaaacaaaacaacgaaccccgcccccaacgcaaacataaagctcccaaaatcggatgcttcaagttccaggcataacctgggagatcagaaacgccctcagaaatggggttggttttcctctgaggaactgagaccctcttccaagacatgcggttagcattagattgagtaaatcgcagtcgctaccctaattctagagatgtaggaaacttcctggggcgtgaagtgcctcattccttcttcttccaaggagtaaaaccccttctcaatctgtccccagattcccttttctccccacaccttctccgtggtccgctactcaaagctctacagttagagcttcattttttttagtactcacgacagatctattacatttagtaacctacccagtgctttcacagtctctcttttgatactcttaacagctctgtgagtcaaggatatttatcttcatttcacagattggaaaactgaaacccagagaaaagggacttgcccaaggccacacaccaaattagtgacagagctagaactagactccagttctccgacttccagctaagtctcttta

SEQ ID NO: 414 - DNA, 183445 bp, Homo sapiens
  source 1..183445: mol_type = genomic DNA
ctggaaaagaagctggttttcatctgctgtatgtgctggtcccaaacatacccttttctctttttttagtattttttttcccaattaggaattcaatgtggaaaacataccctttttcttcaacaggcttttaatgttgggaagacaggttaaaaaaaacaacaacaacaggctggctgtgccggcgcacgcctggaatcccagcactgtgggaggccaaggcaggcagatcacctgaggtcaggagttcgagaccagcctggccaacatggcgaaaccccgtctctactaaaaatacaaaaattagtcaggcgcggtggtgtcgcttgtaatctcagctacttgggagactgaggcaggagaatggcttgaacctgtgagctgggatcgtgccactgcactctagccggggcgacagagcgagactctgtctcaaaaaaaaaaaaaaaaaaaaaccctcatcgctgttgtgaggatgaatggatgggatctggaagtcactgtggtaaacacaaatctgggaaccacagagtggcgttttcacagccgcccccagcctccacctgcagggcctggttttcctggctgccggaggaagcccttgaatatgccacagctggtgctgaacctgcttccaattagcaacaagaatctgaaggtggagctgcttggcggggattatcatgccacccacttcgcctgcatctgtggcctttacgacctctcactatcgatccctgacactcagaagtgattcttccctaacggtttcccgcaaagcagtcactgtataaacctgaacctttggagtaaaccttccccacgggtcttaaggaagctacagacccactctaaaaggggaattctggtgtcaagaatccagttgcaatgacttagggcaaccccctcgctggactttgttcctcctgccccaaaggtaagcagctgctaagagaacccacctttcctccgaggccatcatgatacatggagagaaatcctgccacctcccacattcaggtcggccacattcatcccacccaccccgacccctaagggagactctggcagcgttcccagagaagccttgagcctgggacctgctgggtttaagaggctcccacacttggcccattcttcacaaggagacccgtgcgtgattcctcctgttctcccaaccagctttctcaggcttcagaggactcggctcccctggagggaggaaatgggcaagaatgtccacagcaaggtacgcgatctgaggattcaccctccgtccagggccaagtcaaaccaggagagacggtggccagggctgcaggagggatctgcctctgccacggtcatccaaatgagcttcctggctgccggaagccaagaggatgtgacagatgctacatcctgggggtctcaaaactcctgggactcagctcccagctaccaggtatcctccactgcccaccccgatagagcacaggaccacaagcaaaaacaacttttgtgatcaaggacagcagaggcccagggtggatgaggtccagagatgcctgctttatttcctacggggtgatcgcatttcaggctggtaacatcacataacaagtctaatcgccaactagttgtacgcctctgaactacaagtcaacaatccaattcagcaaggaacaacagtgtcaacagctcattagcgggtggggaccggattttccaaatcaatggtcttggctggcagagtgctgagtggggcctgagtgaatgaggctaaaacgcttggccgaagccgtccatccccaatcctgagaacagagttgtctgtttctctttcgggggtcaggtcagcccaagtaagaggccaacaacctacctgggccgatacaaggcgacacaaggcccacccgtggctgacgcgccctccaccctcactccatcccggggcacagctccttccgctggtgcttaggaaaaggcgaggcttctggtaatttctcatctttgtagttctgctttgaaaagaaaagggggccgggcacggcggctcacgcctgtaatcccagcactttgggaggccgaggcgggtggatcacctgaggtcaggagttcgagaccagcctggccaacatggtgaaaccccatctctactaaaaatacaaaaattagccaggtacggtggcgggtgcctgtaatcccagctactcgggaggctgaggcaggagaatcacttgaaccttgggggcggaggttgaagtgagccaagatggtgccactgcactccagcctgggcgacagagcaagactccatctcaaaaaaaagaaaataaaagggaatggcaggggtgatcgaacgtgggtgtgggcacctcagcagagatcaggggccttgggcacagagctgggtggagcgagaggtccgtgctggtgcagaggtgctcctcctaggactcagggctaagtttcttgggaagatgtccaaagagaaggattcgttaacagaatttcaggatcgtgggagctgtttgtatgatatgaaccattaccttagctacatttttcttctcacccaaaaaacctctacaagcttccttttgcatttggagatcccctgcctgagaacacaagagtgggctgcttttctctcagaccgaggaagactgtgttgcttagaaaaggacgtcctcacccgcagctctaagcggaggccctttctcagctcagcctccacgcaggtgtcacccggcggttcccctctggccgtccggggccgtgtgtgccgacgtcagagtcagagcccgagcgggacccaccggccctccacgctcactctgcccaggacaccctggcagatccttcaccaaaagctagtgactttgcgaaagccatgcagccccgctctggccgggcccccggccatcccgtgctcccaaacagagtctccaaacacggtggactctgccgctgctgattccacaccccagggtgctggctgaggagtttactgcagaaacaaggcaccacagagaggctggacacttgggtggtgggattcggggcacgctgggtaagtccaagggcggaaggaaggagggggaggaggagaaggctgagttttaaataacgtctcaggaggccggagccacgctagatgggctccggtttgagcttctctgctaggaagtcattcacaaaggcctccacgatggcgggggtgatctcctccacgtccatcacgtacttggcccgggctgacatgtccaggatggtgagcaaaggggcagcctcaggcaggttggtgtaatctcgcagggagtcagtcatgtcatcctgaagccgtcaggagggagagaaaaccaagaagttttaaagaaaggagggggagagtcccctgggcccagtctccccaggtgtggtagctcccgcaccctgaagagccggcgtttcccaagcagagggctcccagcctgggaaggagggaaccctgccctgccttccggaggaaggggctgctttgtaaaattctctctttgcatccgccctgcaaaccactaggtaagtcgtctgtatttaattatttatgtatttattagcatcaacaccattttaatacgtcctcagcattttagaaatgtcacattcttttttttttttttttttttgagatggagtctcgctctgtcacccaggctggagtgcagtggcacgatctcggctcactgcaagctccacctcccgggtttaagcaattctcctgcctcagcctcctgagtagctgggactacaggcgcccaccacgcccggctaattttttacatttttagtagagacggggtttcaccatgttggtcaggctggtctccaactcctgacctcaggtgatccgcctaccttggcctcccaaagtgctaggattacaggcgtcagccaccgtgccagtctagaaatgtcatagcctctgattgtttatttttgtaaccaactgtcaatgatttgcagccccactgtgggttatctgaggccaatctggacttcaactctggaatgtttttaaacagagacagctcgctgtgttccaactcccacccctgtggtttcaggcaggacaggagctgcacagccagccagttcagaagacagcgctgcttaagcactgtggaagcttacgctgcctcactacttatctgagaaagaagctggcactttatcctacattcccagcagctgtcctggtgaatttccctaatagcagacatagcctcatgcagacaccaaggcaaacacagaaatccaaagacaaggagaaaggatttgtaagggagctactttttttttttggagatagagtctctttctgttgccccagctggagtgaagtggcgcagtcatagctcactgcagcctccacctcctgggctcaagcaatcctcccacctcagcctcctgagtagctgggactctagccatgcagcaccatgcctggctaatttttgtacattttttggagacacaaaagtccagcccagccagacgggagccagcaaactgccttggagcagcccctcgtccactctgaaccttgcctccctcccctgtgaaacaggacagcgactacgttcccagccagagagccaggagcgaaggagacagcccaggtgaaatatgcggctctgtgcctggcgtacagaaaacctgcaaatgctccttccagacttgacacctctcaaggccgcccccgcccgtgcccggcccctgctgtgctgcagccatcttttctcagagccattctgcaggggttggagtcactgcatgccgcgcagcctccctggggctgggcttggtgtgcagtggccagtgccaccccgaggcagggcctgtgaacctctttgctcccctccacccccgggctgagcaggtgactggagccgcctgggaaggacccaggtgctgggctgggcagggccgggggctgaggtgatgaatgggtggcacagggtgtctggctgccgcctgcctcctccgtgcctctcctgggatccaaacacagcgtgaaatcagcacagggctctgaccaactggaggtacagatgggtggatggagggcagggggcggcctccaaaactgtctgtcagtcagtggggtggggtggggtggggaggtggcagcgcaggcatggaggaggctcctgggttggaggagctcaagaatgagagcctgcacctgtgctgagtcgcggagacgcccgtctgcagggtgcagggtgcagggttccaggccctggataactgggtacctgcgggagggcgctctgctgaaagccccactttcccaccctgtgaagagtctcctgcctggtccagccccgctggagacctcaaagggacagcctgggtgaaacagacggggagcggcagcaatttccaacctcagcactcaccgggccggctgggtgaccgcaggtataagcagtagccccagccaggatccctctgatgagatcggcccactgcagccagcgcggaggcacgaacccagcattttgtaaagactcaagggcctggttgtgacccaggaggtgtggatcacactttgcagccacggccactctccccagccgctcaggcgggaagcagcctggggacggctccctgctgacctgaggctgccgagcatggacgggaagaggaagcagcaggggagggaatggttttccatggcgaatggctacctttccttgccacatttgtctgtgggctctctcagaagcacaggcagccctgaccctggggtcctttcaggcaaccctggggccaggatcagtcctgtgccagaagtcccagctgagccagccctgggccaagcctctcctccgcactcacctccccggctacgaagaacagaaggggtgcctcctcctctttggctttgtacttggcaatgattttctcagctatcggctgaatcagctgcttggccgcctcggactctccgtcatcctcagaatctgtgattgggtcgggggtagaaaaagacggggagaaaaagcactggcttgtcaaacagagcggcacccgccgagggggcctgagctgcagaaacgcccgcctgagcggcccctgaacggaaatgaacttccccttggatgcaggtcttgctccccgcatgcatgggtgtgtgtgcacatgcgtcccagcagcaaagctcacagtgctctcctgcaccgggctccccaggaggaacctgcctcactgagcagctctgctctcccaggtagacagtcttcccattgaattcctcacaaacccgcctgggaggctgagcttcccctaagccaggacctgaggcgcctgctagtgtttctctcagccacagaatgagaagccatgacctccgacctccgacttcccagtgaaaatggcagaagaactggtggtgagcgggagggggtgaggactgtggtctggtcagcggcttttttttttttttttttttttttttgagacagagtctcgctctgttgcccaggctggagtgcagtggtgccatctgggctcactacaacttctgcctccccggttcaagcgattctcgtgcctcagcctcccgagtagctgggattacaggcgtgagccaccacacccaggctcgtacagtgattttgagttgttggaggggagccacaagtccaaggcagagggccaggttttgcaaaaggaaccagggtcatcccatcagactgcagggagcctggcatggatgcgcctgtgtccccctggcccggctgggcagttacccacggagctcagactgggtgagatgggagacggggaggtgcaagcgaggacaaaggagccaaggcagccaccgggctggagcagctcttcagagcacagaggatccgcagaagcagccttggtgagcctcggccagaggggcccagcccctgcagctgccgtgtgtgccacccgccctttccaacaatgggtctgcgcatgggggccccgagggcatcctcccggcctgacctattctgcccagctggcagctggggagcagctaggagggaaagtgcagctgcagctcccacaggggccagccatgaataaatcattggggtcaaaagcaaggcttcagggagagacaaaggcccaggcttgcactgctggtgacagagagaagcggcagggacaggctcctcccaagtgaggcccctcctgtcccgccccccagccacccctcgccccctgcccccgtgagcttcatacctacaaaaaggacgaggcaggggccctcgttaagctgcgcggcgttggagtcggagagctccagcacgggcttggggtgccaggggaactcccggcagtcctcgtcgttcagcacctccacccgcccctgccgcgtgatcacctcgccctgcgggtccagcatgatgagcgtggggatgcctgcagggaagagggggtgcttggccgctggcccgggagatgctggccctgcctggcaggaggctcgcggggtccagcccggggtccccccgaccgtggtggagcccaccgaggacctggtacaggctcacaatgaagaggccaggtctaaagtcacaaagcctggggagaatccaggcctggccagggggagccatggaaccccctcgggtcagcctgtaacctgtcaccttcgcctttcagggcctcaggatcctcagctgcagcctgatgagtgtgttgtcgttcctaccttattccgctacagaaagatcaatgagttcatgcggttaaagaacttagagtttgggaggctgaggtggatggatcacttgaggtcaggagttggagaccagcctggccaacatggtgaaacccccgtctctactaaaaatacaaaaactagctgggcgtggtggcgggcgcctgtagtcccagctactcgggaggctgaggcaggagaatcgctcgaactcgggaggtggaggttgcagtgagccaggattgcaccactgcactccagcctggacaacagagcaagattctgtctctaaacaaataaataaataaataagaacttagcacagggtcatggcgcatcggagcaatcactcactgctggtctcccaaagacacagaagaccttccccagctgctgggggtcaaacacggaacaggcagtgcagtgaccacacggcggacttgctgtggccaccgatgcaagacgggtcctcgcccggccacagtgagcgcagggccagtgccgccggggggaacctgaggctggccgcaccggagactcgaagaggaggacagctgactgcagcccccgccgtctgcaccccagccctccccgctccccagggctgcagcccccgccgtctgcaccccagcacaaccccctccccagggctgcagcccccgccgtctgcaccccagcacaaccccctccccagggctgcagcccccgccgtctgcaccccagctccccccttccccagggctgcagcccccgccgtctgcaccccagctccccccttccccagggctggggaagaaaagtaacagaaagcttgcctgcaaaccagaaaccgcgcaaccccagccaaaaagccttcaatgaaaactcagagaaagccccactctggtcaaggtgcacgtgggttttctgtgtctctgttctttttaccccactccccgcagcctctcctccagccagggctacaggcccccacccacggcccacccttcggggacctttgtctctccactggcagccgctccccccacaccctgcacgttccagacgcctctcctcctgggctgcccagagcctgaattttatgtgaaagtcagagcaatttaatatttatagattcccaaggattcggtcagtaatttgctccgctgacattctccttccctgtcggggggatgccgaggtaccagacatatggccctcgtgtttcgtaccctgctgcggccaccagcaccgcgggcgtgcctgccttcgaaaggaatcaacgaatccattatgttcacacctatgagacaaagtggctgatgtatcagggagtgggtccagagagaacaggctcttgagaacagccactccgacatcacacacactcacatacacacacacacacacacacacacacgcacgcgcccacacacacatgcggccggctctcactggggattttcgggtgtgctcagcgtggacagtgcccgaggagctgtgtgtgctgccgcacaagaaacctgggcatttccagccacatcctcaggctgcattttatcccctgaggccggggtccatgcccgctgtgtccatccatgaggctcgggggctggtctcgaggctgcagcccaaagggaatccgggccagggaccaccacagggacagctggccgcacaggagcccctccacatcaccacacacccttctcaaaatccccccggcaaggtccttcctcagagtagggtgtttctgaaattgggcaattatgagcactggggtaaaccagagcccctgctgctgtgacaggccccgcggccagcctgcgtgtgccccggcgtgggatgccgagtgggtctgtggaagagaggcaggcacgggggacggggagggaggagaagccaacctgaaggcaaagctgcccatttcccggctcagcgcctggggctctccgagggcctcctccaagcggcctttttcctgactgtggctgcagcctcttttgagtccgtgcctgcggggcccaggacagcatggcgaggacacggagcccccacctggcttctgaggagcactcaggggcttccccgaggaacggctcctcctaagacgaggtgtgccgggacgggccgtgttgggccgcgtgactgtctgcataagcagaaaccaacttgggcccaaggaagccactcgtgttcggcccctgcacgggggaaagcacccatgtctgctgtgccaggctgcctcccctcagctggtcctgacgagcttggcctacagccatgacgagtgcacatccctccaaaggtgaaccaggggcgggaaacggaactggcttctgcggccgtctgccctgtgctaggcacggcacagatggcactggctaatccttatcacagatggggcgggcagcatcaggatccccctaacagatggtcaaggtgacccccaggtcacccagccaggcagtggttacagtagggatgggggtcacccagccaggcagtggttacactggggacaggaccctgatccacctgttgcagaagctgctgctcttcctgccaggccgtggacgcttctggggtcctcacagcacctgcgatggggactgtcttaaccagggcggggaagtcctgtacctgcagctttctgcaccacccacctccctctgctcctgggggagaaggctgagaccacagccaccatttccctttctcccccttcacacacgccctgttcccccagcccttgaagcaggttctctgaaatacacattttttttttttttttagacgcagtctccctctgctgcccaggctggagtgcagtggcgcgatctcggctcactgcaagctccacctcccgggttcaagcgattctcctgcctcagcctcccaagtagctggggttacaggtacacaccaccacacccagataatttttagtagaaacggggtttccccatgttggccaggatggtctcgaactcccgacctcaggtgatccgcccacctcggcctcccaaagtgctgagataacaggtgtgaaccaccatgcccggccagtgtaaaacacttattagcagagtacctggtatattgatattgtaagtattctataagtattggctattattataaaccagttttttttttttttttgagacagagtctcactctgttgcccaggctggaatgcaatggtgcgatctcagctccctgcagcctccgcctcctgggttcaagtgattatcttgcttcagcttccccagtagctgggattacaggcacccgccaccacacctggctcatttttttaattttttagtagagacggggtttcaccatgttggccaagctggtctcaaactcctgacctcaagtgatctgcccgcctcggcctcccaaactgctgggattacaggtgtgaggcaccgcacccagccattatattcttttaatcacccctaaactgattatttggctcgtgagaaggcagacatacggaaaactgggagcttgctctagtgagatcaacagagtcctccgtgatgggctggaagaagttagctaaagaagcagaaagcagagacactgtcaagaccgtggtgagggttccggcaacagtgtgatgtctgccaagggtggggttggcgtgcttttgcttccaccatcccaagctacactcctgggcttggaacacggactctaagttcctagagagggcgcagccctgagtcccctgctctgtgacatgagtggcgcctacagacccctttcaccgtctccctcaaaacacacagaagagtcaactccaaactctcttctccaaggaggagcctagttgcaagtatttaaaaccatctcaaagccaggtgcgccgagactgtcccacggtttagtctggtgacttttccactgccaacgagacacggagttttgaagcaggtgggggctggggcaaggaagctgaaggggtccaggaccctgggaggcagagaggagcgggcagggctgtgacccagccttctctgcatctggatggcaacgtgatctgaggcagccaggaggaattacccaaagattgctgggagctgggaggagcaatggaaggaaaagcaggttctaggacagaaagagctggtgaggacgcaccagcaggcaaaatattaagtgatcatgaaaatggtccttacaaagaccatagcgacacggcaaatttttgcgccacactgtttagtaaaaactgccgagcgcacagtgccgtgtgcatgtgacgagtccgtgtgagcggcgggcaccttacgagccagtgcgagcggcgggcaccttacgagtcagtgtgagtggcgtgtacgttaagagtccctgtgagtgccgtgcacgttaagagtccgtgtgagtggcgtgtacgttacgagtctgtgtgagtggcgtgtacgttacgagtctgtgagtggcgtgtacgttacgagtctgtgagtggcgtgcacgttaagagtccgtgtgagtggcgtgcacgttacgagtccctgtgagtggcgtgcacgttacgagtccgtgtgagtggcgtgcacgttacgagtccgtgtgagtggcgtgcacgttacgagtctgtgactggcgtgcacgttacgagtctgtgactggcgtgcatgttacgagtctgtgagtggcgtgcacgttacgagtccgtgtgagtggcgtgcacgttacgagtctgtgagtggcgtgcacgttacgagtctgtgagtggcgtgcacgttacgagtctgtgagtggtgtgcacgttacgagtgcatgtgagtggcgtgtacgttaagagtccgtgtgagttgctgctgaggcaggaatgtgggtgggatgacagcgagatatctatgtctagttacgttttctttaacggcagcctatttagctcgttaacatcagatgaaaatcagaactgaaaggccgtgggggtgagatgggatgacaaacaccaaccaatgcccagaatctgttcctcggatccttccgttcctccctcctcccggctcccccaaaacactcccctgcttagagagttaaggaaaggagccgggcacggtggctcacacctgtaatcctggcactttggaagcctgaggcaggtggatcccctgaggtcaggaggtggagaccagcctgaccaacatggtgaaaccccgtctctactaaaaatacaaaattagctgggcgtggtagcgcacccctgtactcccagctactcaggaggctgaagcaggagaatcgcttgaacgcgggaggcagagcttgcagtgagcggagatcttgccactgcactccagcctgggcgacagagcgagactctgcctcaaaaaaaaaaaattagacaaaacacataaaagagaactgcaaaaccgctctaaaggtctcgaggcagcccctcttctggttgaaacatgcaatctccaaatgtttcatttttatataaacagattctgcctcaaatccatttttttgaaaggggcaaaggaagagagtcaaggaagggaacgggatgaggaaggagggaagcagaagaggaagaaagaaggaggcggagaaggcagagcgggaggaggtggcacaggagggaagaaggaaaacagagaagaggattcaacgctggaggagcaaagggccctcaccccggccgcccggcacctctagctgcttccgcatctgctccaggccctgcacagccctcaggccgtccgccctccctgaaggttgggccacgggagccaaaccagacagggcccctggcctaagagagaaggggctgtaaacctccctgcaaagagtgccgtgctccctggcagccgaggatgactcagacaactgctaacggggtctgtcttctgccaggtgtgttgacaacggtctccttagaaaaagaattttcagcactgcacacggctgcacattccccaggctgcgtaaagccccggggttggggggggggcagcactctggaagccagttattcccacgagaccaggaggtggggggacgccaaatgccaggtccttggtgagcccagtggtcctgtggagatgggtcacacagcccggctcagcccagggcaccgaaggaagccggtggccagcctgtcagcggcagtgggactttggccaggccggcctggggcccaaactcatcatcaagaccacggcagaggccgccaccctgtgagatggacagctcaagggcacagcctcgaggccccgactcccccacccgtaccgccccccagacacctcaacgcactggcagcatttggcaggcccccttcactcggcagggtgattctcaaaaccccaagatgcttataggactccgggttgtgcggttacccagttctgctttttttttttttttttttttttttgagacggagtctcgctctgtcgcccaggctggagtgcagtggcaagatctcggctcactgcaagctccgtctcccgggttcacgccattctcctgcctcagcctcccgagtagctgggactacaggcgcccgtcaccacgcctggctaattttttgtatttttaatagagacggggtttcaccgtgttagccaggacggtctcgatctcctgacctcgtgatccgcccgcctcggcctcccaaagtgctgggattacaggcgtgagccactgcgcgtggcctgggttacccattttcacccgagcctgtcagaacactctgccctcacatgactcaatccacaaaatgaccagcagatcaagccactgccccagtgtaagtccaaagacaggccaggtggaggcggctccctttgggtgcaggcagggggtgtacctggcactgctctgtgaaggaatctttatacaagctcttcagcgggagagaaacaagtgagatgggactgagaccccagggcacagacagactcaaacagggagcaggacgtccccagagaagccccacaggatgtgcagaccagacactccaacagccaggaccctgcagagcgagtgtgtgtgtgagtctgtgtgtgcacgtgtgtgtgatggcgcgagtgtgcattgtgtgagtgtaggtgagtgtaggtgtgtgtgagtgtgcatgtgtgtgactgtaggtgtgtgtgagtgtaggtgtgtgcacatatgaatgtaggtgtttgcatgtgagtgtagggtgtgtgagtgtagggtgcgtgagtgagagtgtgcatatgtgtgagtgtaggtgtgtgcatgtgtgtaggtgtgtgtgcgtgagtgtaggtgtgtgtgcgagtgtgcatgtgtgagtgtaggtgtgtgcatgtgtgtaggtgtgtgtgggtgtgtgcgcacatgtgaatgtaggtgtgtgcatgtgtgactgtaggtgtgtgcgtgtgtgagtgtgcatatgtgtgagtgtaggtgtgcatgtttgtaggtgtgtgtgcacatgtgaatgtaggtgtttgcatgtgtgtaggttgtgtgcacgcgtgtgtgaatgtgtgagcgtgtgtgtgcgtgtgttcacacacctggaacacgtccactgaatgacactggaagccgtaaccacggaatcacacaaaagctcagaaatattcagaattcaatcaaaaatactggtcagagttttgtgacgctacaaagcttatgaacgaatgcacagttccttcagaggtatttcggcccagcctggccacatttaaatatcctcagaggcaaagaaaggcaaactcccatcaagggatggtgcagtctagggagggtggctggcttctaagactagagagaagccagaactgataccagtgaaaccagggactgagtgagacgggctctgaaggagaaacggcccccggcttggaggacaaggacagggcaccacaaatagggccatcgacgcggacggaatgccgcacgtggggctcagcccaacctcgaagcgctgagaaggcgcttccaaagtgatatccctggaatgatataatgatttccttaatacgtgagcatctttcaaaactaggaggatctggaattaagtttagaagtatgaatcaaactcatgccactgacgtttctgtgtgtcaagaagtgcatgcatatttggtatttaacttcagcattttttttttgtttaagagactacggccggccgggcgcggtggctcacgcctgtaatcccagcactttgggaggccaaggcgggcacatcacgaggtcaggagtttgagaccagcctggtcaaatggagaaactctgtctctactaaaaatacaaaaattagctgggcgtagtggcaggtgcctataatcccagctactcaggaggctgaggcaggaagatcgcttgaacccgggaggcagaggttgcagtgagccaagattgtgccaatgtactccagcctctgggtaacagagcaagactctgtctaaaaaaaaaaagagccgggcacggtgactcatgcctgtaatcccagcactttgggaggccaaggcaggcagatcacatgaggtcaggagctcaagaccaggctggccaacatggtgaaaccctgtctctactaaaaatacaaaaagttagccaggtgtggtggtgggtgcctataatcccagctactccggaggctgacgcaggagaacggcgtgaacccggaaggcagatgtagtgagcagagattgcgccactgcactccagcctgggtgatagagtgagactctgtctcaaaaaaaagaaaagaaaaaaagaaaaaaggctgtcctagggtaccttattagtttcaggtgaccccctggcctgagcgttggccaccagcaataccggcaacccacgggccctcacatccaggaaggaactccgtacctcagagaggaagattctgctccacggatgatgaggtgctgggaaagaaaatgcctctatgtggaaaggcctcctgacccaatggagcagcagagagggggcgcggcagcagctccactctaagtgacaagtgtccgtcttccaggccctcgtacgaaatgacacgtactcggaccaacactgtcgtgttcgtgaagacgtcatcacactccgctcctcagatatgcccaactgtccatctcatcctgtccactcaagggcagcactgggcccctctcctagtgacttcccgtggagctcagtacggagagtatgggatggttagcacgcactcaatacatcaaatccggccgggcgcagtggctcacgcctgtaatcccagcacttagggaggaatttcactcttgtcacccaggctggagtgcagtggtgtgatctcggctcactacaacctccgcctcccaggttcaagtgattctcctgcctcagcctcccgagtagctgggattataggtgaccaccaccacgcctggctaatttttgtatttttagtagagatggggtttcgccatgttggccaggctgatctcgaactcctgacctcaggtgatccacccacctcggcctcccaaagtccagggattacaggcgtgagccaccatgcctaggcagtagttacaaattcagctgagtcttctaggtgctaaagcaaagaaaataattgtggttcataatgaaattcaaagtatacaaaagataaaaacaaaagcctgccacccggtaggttttgaaggcgatgaggcactcacagttcagctgacatccatccatatgatgagggccagtgtccactctagatccctaagctctgtaggttttgaaggcgacaaggcacccacagttcagctgacttccatctgtatgatgagggcgagtgtccactctagatccctaagctctgtaggttttgaaggcgacgaggcactcacagttcagctgacacccatccgtacgatgagggcgagtgtccactctagatccctaagctctgtaggttttgaaggcgatgaggcactcacagttcagctgacttccatccgtatgatgagggcgagtgtccactctagatccctaagctctgtaggttttgaaggcgatgaggcactcacagttcagctgacttccatccgtatgatgagggcgagtgtccactctagatccctaagctctgtaggttttgaaggcgatgaggcacccacagttcagctgacatccatccgtacaatgagggccagtgtccactctagatccctaagctctgcaaagcgcagggcctgttatctgttttattcaagataaaaacgttcttcttggcctgaacgtttaacgtgcctccggatcatgtgtgaggggtgctccaagacccagccacgtcaaacagagtcacactttgtacacacctgtgcacacacgtgcacacacagaggccagtagggaggataagaggggcctgaatgtgaccggcgggcctttgttaggggagtcggaggaagacacacatcagagaccatcacctcctggtgtataaggggaacagggattagaagaaacccaggatatctctgtatggagaaaggatggaaaatccacagccatcaggaggggcaggacacggcgctcggtaacgcttgggagagacctgggccctacgtagctgactagcatctcacctgtagcccctccaagggcctctggttgcaactggaagctgaggccgaaaccccttcccactgtccagttacaatcaggcagtcacgtcgcttttaattaacacagagtcgttctggggacgaagacctgaatcccatggattagaaggacaaagtacaacccatgtatttttttaaagtgcaaaatgcttacagccccccagaccttcactgtccctgtcatggtctctaaggagagtgccctgtgaggaccaggccaggtctatcctgtgacgttgcagccaagatccttctgcaagaaaacgtgtcggccgggcctctgcacgtgcggttccgtctgccgggaccttccctccaccatctgcttggtccgttcctacttggtttccagatcccctggggcatccttggtcttctctggtctccccgacgaggccaaatctccctaccccagcactggcggcttcgcattcaaagcactcacagttcaactgacatccatctgcacgattagggtgagtctccgctctagacctatacgctctgcaaagggcaggacctgtatctgttttattcaagtctgtgactccaatcccaggcagaatgcaatggcatccagtcagccctcagtaaagacattcactcagcaatgaacgaataaatgaattaagagatgggaagccctcctgacccccacacagtggtaattcagccagctattcaggaccactggcgtaggggcatcccgaaacttatctcaacaaacacagctcctacccccaggcacgggcaccttaagtgtctctgcagagggccaggcaggagtaagcgctgacctccttggcatctccaacttggggccttttcttctggtccactaggcaacatcatgtccctcaacttttgtttggaaagcaaacgctttcatttatgctgttaacaggaggcagcagcaccccccgacacaccccaaattcccctaggattaacgaatggatctagactattaatactccaagtgtggtccatgggctggcaacatcagcactgcctggaggctgctcagaaacagtctctcagctcccgcttagccccaccaaatccaaatctccattttcagatctccaggtgattctcatatgtacttgggattgagaagcaccaatctaaaattaaatattattttttttaaaacttctgctccaaacaaacccatatatgtattctaaatggtgaagaaaaaaggtcaaagagcctaatgaggccagacgtggtggctcacgcctgtaatcccagcactttgggaggccgaggtgggcggatcacaaggtcaagagatcgagaccatcctggccaacatggtgaaaccccatctctactaaaaatacaaaaaatttagccgggcgtgtggtgggtgcctgtggtcccagctactggggaggctgaggcaggagaatggcgtgaacccgggaggcggagcttgcagtgaaccaagattgcgccactgcactccagccagggcgacagagcaagactccaattcaggaaaaaaaaaaaaaaaaaagagcctgatgagatgcccctcaggcgcagaacttctgggtaaatctggatttgtcttttttttcactctctgtaaccctaggagtgctgagaactcaattattagctgtatctgtttacagctgacaagcatctgccactaatgatacaaagagaacgcgtttaactcagactgcccagttacctgctttgtgaagagaaaaacctggctgggtgaaggctgggaaggaggtattcacacgataaagaataaaaatacattcagtctcattaacaatcattatttccggctgggtgcagtggctcacgcctgtcatcccagcactttgggaggccgaggcgggtggatcacttgagcccatgagttcgagaccagcctgggcaacatggcaaaacttcatctctactaaaaatacaaaaaaatgagcagggagtggtggtgtgcacctgtagtcccagctactcgggaggctgaggtgagaggatggcttgagccctggaggcagaggttgtggtgagccgagatcacgccactgcactccagcctgggcgacacggtgagaccctgacttaaaaatatatatataatttctgaaaaacaccatgattagtactctaagtcctagtttacaacactctcaggaaattgattttctcaccgagaaggtgatacccactcagccctcactatcacgcctctttacatactttacttattcatgctcccaacaattctctgtggcaaagctttaccaccccactttgcagacaaggaaactgaggcccaaagactctgagtgatgaaactggagatcactctcaagtctctttcacagtaaacctttgggataagattctggccaagtcatttgggaggctgtgctccgtgtcccaatcatattagaatccaccatgggccgggtgcagtggctcacgcctgtcatcccagcactttgggaggtcgaggcgggcagatcacgaggtcaagagatcgagaccatcctggccaacatggtgaaaccccatctctactaaaaatacaaaaaatttagccgggcgtgtggtgggcgcctgtagtcccagctactggggaggctgaggcaggagaatggcgtgaacccgggaggcggagcttgcagtgagcggagatcgcaccactgcactccagcctgggcaacagagtgagactccgtctcaaaaaaaaaaagaaatgcaccatgctggacagtgagaagtagctgtcttactaagacagtatttagtagtagtattttttgagacagagtctccctctgttgcccaggttggagtgcaatagcacaatctcggctcactgcaacctctgcctcctgggttcaagcaattcccctgcctcagcctcctgagtagctggtactacaggcacccgccaccacgcccagctaatttttgtatttttagtagagaccgggtttcaccgtgttgtccaaactggtctcgaactcctgagctcaggtgatccacctgcctcagcctcccaaagtgctggggttacagtgtgagctgccatgcccggcctgacaatacttattttttaaaaatggcttagaattcacaccatgaaaattctacactgctgagaaacatgaaaggcacatgaatattcatggaaataatgatgctcttcttcttaaaggaaagccaaagacacggtgagctcaggtgagcaggtttccaggagccacacggagccggggcctggagcgcctaccttggattccgtacagccggttgaggcgcgaccgccgggcctcatccgtgtaggggacggcgagccagggcatctcactgaagtactgtttgaaggactcctccgacctacagagagacacacgtggcgggcaaggctcagtatccccactgcaccaacgctgaatcctcccacctctgccgagttctgcccagggattctgcagaagccggggtttctaaccactgtgctccttaggcaacaggctatgggagtgtgttattctaccccggctggtgtccaccaagaagcaaatgcctccacacagcaggtgggtgccggctaagacgccagcccacttcagcagctcccatccaggcaacgcaactcaggtccaactttccatttctcagcacagacaggtctttcttgcctcagagctcagatgtgcacagccactgcatacccgcgggagttctaatttgtgcacggaacagtgactcatatgggacctcaaatttaaaccaaccatatacctatgattccccatgtaaaaaaccctaggaaaggcacacctactcaagcggcagaagcggatcaggggatcccagggctgggtttataggtagagacagacccatgtggggctggggtttatgagcggagaccgacccaaggaacctacggagtgatgaaaatgttccgtgtcttgtctgtgatgatggtggttacgtggtacgtacatcagtcagctgaactgtgtacctttgttccgtgccttgtctgtgatgatggtggtaacatggtacgtacattggtcagctgaactgtgtaccttaaatgcatgcattttacaatatatacattatgcctcaataaagttgatgcttaaaactttaaaaaagggactgtggccaggcgtggtggctcacccctgtaatcccagcactttgggaggccaaggcaggtgaatcatgaggtcaagagatcgagaccgtcctggctaacacggtgaaaccccatctctactaaaaatacaaaaaaattagctgggcatggtggtgggcgcctgtagtcccagctacttgggaggctgaggcaggagaatgacgtgaacccaggaggcggagcttgcagtgagccgagatcgtgccactgcactccagcccgggcgacagagcgagactctgtctcaaaaaaaaaaaaaaaaaaaaaagtgattgtggccagacatggtggctcacacctgtaatcccatcactttgagaggccaaggtgggtggattacttaagccctagagttccagaccagcctgggcaacatggaaaaaccgcatctctactaaaaatacaaaaattagccgggtgtggtggccggcgcctgtagtcccagctactcaggaggctgaggtgggaggatcacttgaacccagaaggtggaggttgcaatgagctaagatcgcaccactgcactctagcctaggcaacagagcgagactccacctaaaaaaaaaaaaaaaaacaaaaaaaaaaactgactgctgcacctggcacggcttcacgctgagacgggagctgtggcatggcagagacgggagctgtggcatggcagagacggggagctgcggcacggcagagacggggagctgtggcatggcagagacgggagctgtggcacggcagaggcgggagctgtggcatggcagagcaggactgcgggccaataagccaagcccaggatggtgtggacaccgcagatacaacaatgtacaaagtgccctgtgtgtgccggcatctcggatccttttgggaacaggaacataagcggcagaggccactggtgactcagtctaaactggggcgggagttttgaggtgaaggaaattcactgataagtgaggccttagagagggcaataagcagaggaaactgaggctcagaggagctgactgactccgggaagaatgcctgttttgtgattccttatccgcgtgtatccgtgtacattcaaatagcaccagacacagcaaagggccagagctgagataacagccatccggccgggcgcggtggctcatgcctgtaatcccagcattttgggaggccaaggcaggaggatcacggggtcaggagatcgagaccatcctggctaacatggtgaaaccccatggctaatacaaaaaattagccaggcatgctggtgggcgcctgtagtcccagctattcgagaggctgaggcaggagaatggcgtgaacccgggaggtggagcttgcagtgagccaagatcgcaccactgcaccccagcctgggcgacagagcgagactccgtctcaaaaaaaacccaaaaaacaaaaaacagccatccaagacaggtgtctgattacattcgtctctggctcttttccatcctcccccttcctcccccttccctgtctcttcaccacaatctaaaaagctgagcaaatcagaaaatacgtcctaatctcaaacaatccaggcctgaattgggacatcccccagtatttacagcaagaagaggttttcctcagctccccttcagacgattaaaggagtaaatgtggctgggtgcggtggctcacacctgtaatcccagcactctggaaggccaaggtgggcgcctcatgaggtcaggagtttgagaccagcctggccaacatggtgaaaccccatctccactaaaaatacaaaaattagccgggcatggtggcgggcacctgtaattccagctactcaggaggctaaggcaggagaatcgcttgaacccaggaggtggaggttgcagtgagctgagatcacaccactgcactccagcctgggagacaagagcaagactctgtctcagaaaaaaaagaaaagaaaaaaaatggatgtcagctacctacagaaaaggggcccagcacttcacggcacgactgacctgtctgcactaacgaagatgatctcgaagttctggcctgcctccttgatcttccggtaggattccaccaggacccgggtgaggcttcggcagggcggacactgaaagacaggacagcaagacccgctgcgtcacgctgcttctccacctcccagccactcaccatccaaggccgggttagcaggactcaagcaggactgggacagcaaaatcccgttcatgaaaggggtggaaatgagatgggtatggtggctacctgggaggctgaggtcagaagatcgcttgagcccaggagtttgaggccagcctgggcaacacagcaagacctagcctcctgcatgaggcaaaaataaacttgcctctcttaatggtgggcatctggcacaagcacccgcattgtccctatgcagtgtgtgagcaggtagcatgaactcatccacatggattgagagaaatatccaggctgggtgcagtggctcacgcctgtcaccccagcactttgggaggccaaggtgggtgcatcacctgagttcaggagttcaagaccagcctgaccaacatggagaaaccccatctctactaaaaatacaaaaattagccgggtttggtagtgtgcgcctggagccccagctacttcaaaagctgaggccgaagaatcacttgaacccgggagacagagggtgcggtgagttgagattgtgccactgcactccagcctaggcgacagagcaagactctgtctcaaaaaaaaaaaaaagggggccaggcacgatggttcatgcttgtaatcccagcactttgggaggccgaggcgggcagatcacctgaggtcaggagttcgagaccagcctggccaacatggcaaaaccctgtctctattaaaaatacaaaaattagtcaggcgtggtggcatgcacctgtaatcccagctactctggaggctgaggcaggagaatcacttgaacccaggaggcaaaggttgcagtgaactgagatcgcgccactgcactccagcctgggtaacagagcgagactctggctcagaaaaaaaaaaaagagggctatcgttatagatcagtcaaagaagtcatttcttgctgcttttttcattcataatcataagcactattcaaccaggcctcgggcacaggagaaggccagaaggccgggaaattcctgcctgggtgtctcacccccagaagccaaccacagctgggcctgctgggaacatcactgcttccttctgtctgagccaaagggggtccaaacactcacccaatgtgcggagaaatagacgcccacgtgagacccctccaggctgctgctctccagagactgcccattgtttctaagcaagggccctgcaatgacttccctgaagggtttcggtccccaggggaactccagacctgaaacagaaaacagatggtaaaagagggcttagacccttcttgatgacctgggacccaggagacttcagagcggttaagactcttcttgatgacctgggacccgggagacctcagagcggcaggcgtgacaagataatcatcaaacagtacttgtcaacacacctacagcgtctgcagctaacacaggaatcaaactagagccattccctgccctcctggcaacggttcccaaacctggatgggtcacaaggtctgtcttccagggacatttttttttttttttttttttgaggtagagtctcactctgtcgccccggctggagtgcagtggcgcaatctcagctcactgcaagctccgcctcccgggttcacgccattccccggcctcagcctcccaagtagctgggactacaggtgcccgccaccaggcccggctaatgttttttttctatttatttttagtagagatggggtttcaccgtgttagccaggatggcctcgatctcctgacctcgtgatccacccgcctcagcctcccaaagtgctggaattacaggcgtgagccaccgcacctggcccttccaggggcttttgaaaagtacaaacgcccaggccacatcctgaggctggagacccaggggcaacgcaaagatgtacgtgcaaaatgaaacaggctccccagaactgacgagggactcggtttgggaatcatcgcctcggggcctcgggaatcaacccgatacccgggattgtggattcacatcccggccgtcacatcccagcggctgtcagctctgactgtacttggaatcagctggggagtttaaaataccacgctcctgggccccacgcccagagattctgattctattgctcttgatgggctcagggagccaagtgagaatttaagtctaataaaagaaaagagtaaaacccacccagcccagatggtccatgttctgatgacacctaagctccaggtagggggagttgagaatacgcttcccgctcaactgaaccacgttttctcacagggtggtccaaggacctgctgcctcaaagtcgcttgggggctgggaaggaggagcacaggctggttgaaaatgcaggtggtcgggcctccccggaaacaagagggatccacaatgctctggaggtcgggctcgggatccacacggggaccaggctctgcggctcagccccacgatcccagcactttgggaggccgaggtgggcggattgcttgagctcaaaagttttgagaccagcctgggcaagcctagggagaccccgtctctacaaataataaaaaattagctgggtgtggcggtgcacgccagtagtcccagctacacgggaggatgagttgagctcaggaggtcgaggctgcagtgaaccgggatcatgccacagcactcggcctgggcgacagagggagatagtgtctcaagagaaaaaaaaaaaaaaaaaagaaaagcttcacgcttggttccaccatgccgtggtttttactgaggacaattctttgaagtaggtggcatttttactgggaaaatgtgtgagcggggttgaatcttctcactggacggattaagtgaggggaggagatctcacagccctgttctcactcactgccagagggaaagacgccacgcggacggccctgagcggggcggctggaggagcacagcccacgcgtagccagcaagaccaaggcccgcagggagtgacagctccaagcaacgaggtgcactcaccgccaaggccaggagagtgacacgggggctgggacttcgctatgtaatgttttaaagaggaaaaaccccactcagcctgcctctaactgtgaagggggcagccgccacggatgcagcactagaggccggggtctgagctctccgctttcccacagcctctgcggccctccaagcggagcttcttacggcagagtccatctcttttggcccatgaattaaagcccctaggagggacattctgatccctgtgaaaatcttaaaaccatgtcctagggaatactatgatttcaccaagacgacattctctaccacgtaaacccacgtgtatctatttcaccagtactctctccaccggtgggacggagattagcctaagggcatggaggagggagggctgggtaataagaggaccatatgcacgggctgaggttttaccttctgggtcatctcggatcaccagcagcccgttcctgcacacaaccttcccagtggtggcgtcgaggaatattagtgatggaatgttggaaattcggtatttgttccaaagtttgagctgtatgaagaaaagcaaaagaaggtggttaagtccaaaccagattcattgcagagttcttttgagccccttaggtctggaggctggatgaacaggcaagcattcaagcacacagaaaagaataatggatgccaagcagggctgctgggcaaaggggcacgttaactacaatcccactgccccccggggtctgtgacagtgcggggggctccgaggagggaggtgatggtcccactgccccccggggtctgcgacagtgtgggggacttggaggtggaggctgatgaccccactggcccccatagtctgcaacagcataggggactcagaggcggaggctgatggaggaccacactcatcctggagagtactacccttccacgtctctaaaaatcacaaagatgaagatggattccacatcttcagaacacaatcagaccaccaggtggttaaggaaggaagggaaggttttcacgagagcctcgccaccctggcagcaggcaacagcagccgctctccacggccccttcccctcaagggagaagagacgggttttctgacagaaggccacggagttaacatctgccccctcagcccttcaccaggtccctcagcccttcaccaggtccctgcacttgaaatatcacagtcgtcgttacgttcagcccacaaagcaccagggaagcaatgcccagggccagccccaaccctcggctctcggtgccgcgtaaaacacgcttcagtctactgtcagattcttgaggttggctgtgcacacggtcagaggtccagggtctaagaggaataaagctgacaaaatgtcaatgcaaagcccagggctggaagccaagcgtgggcggcctctgttcgccatcggggtgaagcctcctgtgttcgttcactgccgtcggggtgaacgccatatgggcaggtgactgggtgctctcgaacctccccgccaagcccaaaaagccacataattaaatgcaatgtcggggccgggcacggtggctcacacctgtgatcccagcgctttgggaggatcacctgaggtcaggagttcaagaccagcctgggcaacatggtggaaccccgtctctacttaaaatacaaaaattagctgggcgtggtggctcacatctgtaatcccagcactttgggaggccgaggtgggtggatcatgaggtcaggagatcgagaccatcctggccaacacggtgaaaccccgtctctactaaaaatacaaaaaattagctggacgtggccgggtgcggtggctcacacctgtaatcccagcactttgggaggctgaggcgggtggatcacgaggccaggagatcgagaccatcctggctaacacggtgaaaccccttctctactaaaaattacaaaaaattagccgggcgtggtggcgggcgcctgtagtcccagctactcgggaggctgaggcaggagaatggcgtgaacccgggaggcggggcttgcggtgagccaggatcacaccactgcactccagcctgggtgacagagtgagactccgtctcaaaaaaataaataaataaaataaatgcattgttgggctgtgttcctccagaaaagacagaagcagggaagctgcagagtgccccactgtttaggccgttcggctctgagcctccctgctgggggcttgagggtcccggcaggaaggctacgcccttgggcagaacagggcaaggatgtgtggcagccaagcaggcatgagaagggcagcagcagagggaagagggcattggtggtgggatgaggattgtcccgagttccatccgaagcggtgaggggcagggcaggggatctgccacacaatgctgggcttccctgtctgtggagacctgtatcttggcaggaagggctgtgggaccccacttcaatctgggtgggccctgctttcaatctgcatgtttttcccagccccacctttccggggggcttacaaaaccagcccgggacctcacaacaagaacaatcctgcacatccagttttttttgttttttggttttttttaaacagaatctcgctctgtcacccaggctggagtgcagtggcacgatcttggctcactgcaacctccacctctcaggttcaaacaattcccctgcctcagcctcccaagtagctgggattacaggtgccccctaccacacccggctagtttttatatttttagtagagacggggtttcaccatgttggccaggctggtctcgaactcctgacctcaggtgatccacccacctcggcctcacaaagtgctgggattacaggtgtgagccaccgtgcctggccttttttttttttttttttaatggagtcttactctgtcacccaggctagagtgcaatggtgtgatctaggctcactgcaacctccacctctagggttcaagcgattctcttgcctcagcctcccgagtagctgggattacaggcacccacctccacgtccagctaatttttctattttcagtagagatagggtttcgccacattggccaggctggtctggaactcctgacctcaggtgatccacccgcctcggcctcccacagtgctgagattacaggcgtgggccaccgcacccggccccagtttttaaattccacgatggcatcattccagagaaacttggtacagaattcagattaaacatccttaagaggttcaacaacagaacaagaccatcctgccacggggatcagcttcataagtttgctgtacaaggactgagtcaggttaattttttttagaaaaggaagattaaaatgattgaatttttctggtttaaaaaggaattcttggagaaaaaaaatcactggaaaaaagtcgggaaacagcaaaaccacacaaattgggattgaaaattacccatgactcaccgctcaggaaagctcagaccgttttatatttttccaccagtggcaaatgagagagcccatttcccaaccttcaccaacattatcactgtcattcatttttccagttcgctagggggaaaaaatgacaagtcatttttgttgcttatccttttttttttttttaggggggcggggtggtggggcaaacagagtctcgctctgttgcccaggctggagtacagtggcacgatcttggctcactgcaacctctgcctcccgggttcaacgaattctctgcctcagcctcccgagtagctgggattacaggcatgcaccaccttgccggctaatttttctatttttagtagagatcgggtttcaccacattggccaggttggtctcgaactcctgacctcaggtgatccgcccacctcggcctcccaaagtgctgggattacaggtgtgagccaccgtgctcggactatctttttttttttttttttaaagttctgggatacatgtgcagaatgtgcaggtttgttacgtaggaatacatgtgccatggtagtttgctgcacccatcaacctgtcatcaaggttttaagccccgcatgcattaggtatttctcctaatgctatccctcccctaggcccccacctgccaacaggccccagtgtgtgatgttcccctccctgtgtccacgtgttttcattgttcaactcccatttatgagtgagaacatgcagtgtttggttttctgttgctgtgttagtttgctgagaatgatgtcttccagcttcatccatgtccctgcaaaggacatgaactcattcttttttatggctgtatagtattccatggtgtatatgtgccacattttctttatccagtctatcattgatgggcatttgggttggttccaagtctttgctatcgtaaacagtgctgcaataaacatacgtgtgcatgtgtctttacagaagaatgatttacaatcctttgggtatacacccagtaatgggattgctgggtcaaatggtgtttttggttctagatccctgaggaatcaccacactgtcctccacaatggttgaactaattgaccctcccaccaacagtgtcaaagttgcttatctttgacttactgatgtgtaggagatacgctgttgtcagcaccctgtgctttccccgctatgttttgtaactggtaagagctgaaagtgattcagcagatattaagtgagcgcccactgtgtgccaggctcgttctaagcacaagagattcagttaagagcagatgaggctgctaccctcgtggggctcctcctccagtgggagaggcagacaataaacaagaatataaacaggaaactcatttcagacaccgagaagtaacagaaagaaaacagggcgggtaagatcacggctgcaactgggaagctgggatggcagcgtggattccagagacaggcgtccgggaggaatgacatttgggcacagacctcagcaaggaaatggaacaagccacaggcacgccgcgggaggccacctgaggcccaagagcccgtgtggaggctgactgcgaaagtctgagtagatgagagaaccaggggcggcggctgtgatgaggtcagagatcatcataagatttgtgaaccacatcgtcaaggccccgtggacgacagcaaaaataacaggtcacagggaatgacgtgacctgattcacagtttaaaaggccatttggggccgggcacgatggctcacgcctgtaatcccagcagtttgggaggccaaggtgggcagatcatctgaggtcaggagttcgacaacagcctggccaacacggtgaaagcccatctctactaaaaatataaaattaaccaggcatggtggcaggcacctgtaatcccagctactcagagggctgaggcaggagaatcacttgaacccgggaggcggaggttgctgtgagccgagactgagctattgcactccagcctgggcaacaagagcgaaactccgtctcaaaaaaaaaaaaaaaacatgctctaacctatgctgattgggttactccagaaaagaaatttgagagcgaaaactgcaagaacaatgtgcttgaacaggaaaaagggcgagacctagatcacaaatggaaaagggccaggttataaaaacagctgacttttcaatgtagttgccccttggctgggtgccgtggatcacacctgtaatcccagcacttagggaggcaagggggagcggatcacccgagcccaggacttcaagaccagcctgggcaacatagtgagacccagttctccattaaaaaaaaaactccacaagtctgaagtatacaagaggatgtatataggttatatgcaaaaactatgccattttatatcaaggacttgagcactggggaggtgggtcttggaaccagtccccccgccacacagatactgagggccgactttatttattcatttatttatttatttatttatttattattttgagatggagtcttgctctgtcacccaggcagtgcagtgacacaatctcagctcactgcaacctccgctcactgcaacctcccctcattgcaacctccacctcccaggttcaagcaattctcatgcttcagcctcctgagtagctgcgattacaggcattcgccaccacacctggctaatttttgtatttttattagagaaccggattcaccctgttggccaggctggtttggaactcctgacctcaggtgatccaagcaccttggcctcccaaagtgctgggattataggcatgacccactgcgcctggccttccataactttttgatcaaaattttatcaggaatggatggctactgattattctttgaacctgttgtggtatatttcatgagtgtccagtctaagattaaactatccttgccttcttagaagagatcctccttactcacatgtattattaagggatcactaggatcttatgttctgtggggcttggggctcccacaagcaaatgccaccttgtaacaggaatctctctgtgggtagctggactgttgcctgaagtaaatttcagcctgtggtcctcaaatgtaaagctagcagatgcaacatgattattagagtggtttgcatttaagcacccctattacccttcaaacgtaagcatgtgctttgctcttagccaggaatttttttttcttttttgagatggagtctcgctctgtcacccaggctggagtgcagtggcgcgatctcggctcactgcaagctccgcctcccaggttcacaccattctcctgcctcagcctcctgagtagctgggactacaggtgcccgccaccacacccagctactattttgtattttttttttttttagtagagacggggtttcaccttgttagccaggatggtctcgatctcctgacctcgtgtccgcccgccttggcctcccaaagtgctgggatgacaggcgtgagccaccatgcccagcctcagccaggaatttttaaggaaatggtggtggggttttggtacctgaacagcctctaccctctaaatgctcaggagaaacgccatctcccaaaccttgccagctaaagaagaaccagtttcttctgaaactcttatgtgagtagaagagttgtaacacctctccctgccctgcccccagtctccacagacatgtctttcctctcggaatcctctctggatgggtaagaaactgtaacctgcatcttccctccctccctaaagattccccgttcctttctggttgcatctcaggagcacaggaggtctctgcttgtgttttatccatttactgttgggtctttgtttccacgtaaaggcccacgctgggttagtggggaaaaaatttccttctagactcacatctgacgctttttatttgtttctttgagacggagtctcgctgtcccccaggctggagtgcagtggcgcgatctcagttcactgcaagctccgcctcctgggttcacaccattctcctgcctcagcctcccgagtagctgggactacaggcacctgccaccacgcccagctaattttttgtattttttagtagagacggggttttaccgtgtcagccaggatggtctcgacctcctgacctcgtgatccgcccacctcagcctcccaaaatgctgggattacaggcatgagccaccgcacccggccgaaaagttatttcttttacagacaaagccatcgtggtctaatttatccaggaacccatgtcattcattagggagctgcatctgtgggcgcctcaggccacccaaagcatgaaggttactcggctctgaaacaatgtggtctgcacgggagtcaccattccgaaaaacacacgaatcagaaggcgacccttctgtcagagaagtcatccaggagtgacttgcggattcacttacgcagcccggaaaccaaaaaatgcttcagcttaaagaaatgatcagcaagattcacctctgcaccctttcaagtgtgaggggcccctcgagtccaccaaaggttttcaaaatgcctctgaaaacagcggtttcatagtcatttttgggtcacagacagttttgaggacaaaagctatggatctttcagcagagaaaaaggcacatacagcaaaaagtcagtgtataaattcacagagttcataaatccccctgaagcctgttagcggaaactgatcacgggaggtctacagaccccaaatgaagacctccctgtcttaagagttcatgtcagtgcacgtcttgaccttgattcaactgagagagagataatcctgccccatctgtatcctgctgtaaacattcctccaatgtagtcaggatctgccgaaaacctaagatgacgttaacagtgaagagcgggtgattaaaaaagaaaaaaaaatctcactctccccgctctcccactgtcgctgtgttcctaaactcaggcagagctcatgccttcaggatggcgaacatcagagccacccaggactgagagaactcactgtcctttttaaaaaagcatttctcagggccaggtgcggtggctcacgcctggaatcccagcactctggggggacgaggcgggtggatcgcttgagcccaggagttcaagaccagcctggacaacatggtaaaaccctatcactccacaaaaaaatacaaaaattagccaggcgtggtggccactcctgtagctccagctgcttaagaggctgaggtaagaggatgctttgagcatgggaggtcaaggctacgatgagctgtgatcgtgtcactgcaccccagcatgagtgacggggcaagaccctgtctcaaaagggctgcactgtctggcattgcagcagctgggaaagaccagatgactttacatccagtgtttgctctgtctagagatcatcctggcaacgtatccacccagggtgcattttgttagtcttgctctgttgcccaggctggagtgcaatggtgcgatctcagctcactgcaacctccacctcctgggtttaagtgattctcctgcctcagcctcctgagtagctggaattacaggcaccaaccaccatgcctggctaatttttgtatttttagtagagattcaaacctcctgaccttatgatccgcccaccttggcctcccaaagtgctgggattacaggcgcccaccaccacgcccgacctaattttgtatttttagtagagatggggtttcaccacgttgggcacgctggtctcgaacctcctgacctcaagtgatctgcccgccttggcctcccaaagtgctgggattacatgtgtgagccactgtgtctggctaatttttgtacttttagtagagacagggtttcaccatgttggctgggctggtctcaaactcctgacctcaccctcccaaagtgctgagatgacaggcgtgagccaccacgcctggccccagggtgcattctcatgatcccttgctgaatggtcttctaccacagccacccaaaggccacacaatgccaacagaaaacgtcacagcaggcctggcgcggtggctcacgcccgtaatcccagcactttgggaggccgaggcgggcggatcacaaggtcaggagatcgagaccatcctggctaacatggtgaaaccctgtctctactaaaaatacaaaaaattagccgggtgtggtgacgggtgcctgtactcccagctactcgggaggctgaggcaggagaatggcgtgaacccaggaggcggagcttgcagtgagctgagatcgtgccactgcactccagcctggaagacagaccgagactctgtttcaaaaaaaaaaaaaaaagaaaacgtcatagcaaacccccaacgcctacaactctactgtttatgattagttcatcaaattcagaagccaggccacagagaacaaagaaaaaaaacaaagaggagacaagattagctcaacttggcaaaaatggaaacggatgacaaagtgggttatccagttacttgaaagttcccactgctccgcctggcagtgggttctgctgaaagactccaaggctgtggttggaactatcctaggaatgcaggccagaaacgcttctacagtgaccaacaaaacaatgaaacacatatcaaaagggacgggactgggaaccgggaaacggtaaaaatgccaacgagaaagtccagcaaatctgaaacaccggtgggattcgtcagcctcatagaggccgcagggaaaaaacaccggtgggattcgtcagcccccacagaggccgcaggggaaaaacaccggtgggattcgtcagcctcatagaggccgcaggggaaaaacaccggtgggattcgtcagcctcatagaggccgcagggaaaaaacaccggtgggattcgtcagcccccacagaggccgcaggggaaaaacaccggtgggattcgtcagcctcatagaggccgcaggggaaaaacaccggtgggattcgtcagcctcatagaggccgcagggaaaaaacaccggtgggattcgtcagcccccacagaggccgcaggggaaaaacaccggtgggattcgtcagcccccacagaggccgcggggaaaaaacaccggtgggattcgtcagcccccacagaggccgcaggggaaaaacaccggtgggattcatcagcccccacagaggccgcagggaaatgcagcctggtgatttccgagaagtcccagttcccgagagcaacatggaatctgcccccgcatgctaaggaccaggtcttgctcttgactggggagcctcagcttttctttccaacagctgctgcaaatctgtgggatcaaggcaaagccaacgcagatgtaggattcatccgcaaactccttggccaggtcagccaagccttctcgggcaaacgtcacccctgccctccagccaaatgccgaccacaatcaaaaccatcctttctgtgagcagcatttgaaaacagagccctaaatgtgctctcaccctttctaaccccaaatgaccaaacaccatgatatacactgagagcaggaatccccctcatcccagcctccaatgtcacaccaggacgaacactgaggttactcagcacaggttccggctccagagcccggctcttccatctgttccagccgcttattagtgggtgaccctggtgaggtatctcaccgtctcttggcttcctcagctgcaaaatgtagataacagaacctacacctcactgaactgctgtgaacatgagttacatagagcgcttagcataaagactggccaatattaggtatgaaataagtgttagttgctttaagctaaggcgctgacacagacaatgggtctcattctgtggcccaggcaaaatcatggctcactgcagcctccacctcccgggctcaagccatcctcccacctcagcctcccagagtgctgggattacaagcgtgagccaccacacctagcttagttgctattattattattattattattattattttctagacccagagtcttgctctgtcgcccaggctggagagcagtgacacaatcatagctcactgcagcctccaccacccgggctcacgtgatccccccacctcagcctccgaggagctgggactacggtcgcacaccaccatgcctcactaattttttgatgttttgtggcaacagcgtctcgctatgtgccccaggctggtctcaaactcctgagctcaagcgttcctcccatctcagactcccaaagtgctggggctacaggtgtaagccactgtgttcagcccccatgccatcttctaaatgctccagcaggaccttgtcctcatatccccagaggtaaggcccagtcttggatccccttgctcctgaggcatgattcccagtgtgtgatttggcccatgactgcaatcctcagagcctagtatacctgctggccaagagcagtgcctgggcacattatgtgtccaataaatgatagatgaacaacaaatgaacagaggaagggagagaggaatcaccgtcctaggtcagccagaacagatgccccctaatcagtccagctcagctacttaatggctttttcatgaccacggctcccccttgttcctggggggcccagaatgctcctgaaatggcagaagaaatgattcgaatccagcgctggtgggatcagagcttctctcgctttgcccgatggtgccttagatcctgtaccctccccacctgcgcattctgccttcgcctggagctgaagcagagaacagaccagcccgtgtgaccaagggaaaggggccgggggtccgggccaggctgatccgagccgtcaccaacctatgagaattccaaaccctcctggtggctctgccattttgatgctacatgttttcagctggttcacagagaggacctatgcatgccccaaggatggcaagagcgtgaggttcacaaaacaacatgtccactctgattcctgcagacaaagccaccgagcatgatatatgccgcacacgttctttctgggtccttctctgccacgccaggctgcattaaaataaaaagactgggtagaaggggatttaaaatctatttttcatctctctaaatctcagaacactgaattttcctttccttctttttttttttttttttttttttgagatggagtctcgctctgtcgcccaggctggagtgcagtggctcgatctctgctcaccacaacctctgcctcctgggttcaagcaattcttctgcctccgcctcccgagtagctgggattacaggtgcccaccaccacacccggctcattttcgtatttttagttgagacggggtctcaccatcttggccaggctggtctcaaactcctgacctcaggtgatccgcccacctcggcctccccagaagctgggattacaggcgtgagccaccgcgcccggccataacagtgaattttctaaccaatttacagatgacctagctgggctttgcaacccgacagagctgaatcagctgtgacttacaacactctaatcaaagtgccacagggatgaaagtggtgagacgccgagtcggctttcaaaaaccttacagtttagaagtgggaaacggtgaaaatggtaaactttacgttacatatatttggccacaatataaaaatatgaagcaacaaccacatatggcagatcaggccaactgccaggagaaatgagcaaaagaaggcccaggaggaagagtggctgcattctggttgactagagctgccaggagggccctgaatcttcaaacacactgaactatctcaaacatccgccctacagctgcctcccttccaaacgggggccgctccaagaacccaccgttccgggttgagtttggtcctcactggtcagtgaaatcttcagtcgatacctgtgtttgctggaggccgtgtgggatagatcaaacggtggagaatgtggttctggagccaggctgcctgggttcaaatccccgctctgctatgaaccaccaggggaactccagccacacacctctcggagtgtcactttcctcatgagtaaaatgaggataataacaacactgcttcgtcctgttgctgtgagaactggattaatgcacgtgcggtgctgacaacactgcttggttcatagtgagcgtcaggccggacgcggtggctcacgcctggaatcccagcattttgggaggccgaggcgggcggatcacttgaggtcaggagttcaagaccagtgtggccaacatggtgaaaccccatctctcctaaaaatacaaaaattagctggtcttggtggcaggtgcctgtaatcccagctactcgggaggctgagacaggagaatcgcttgaacctgggaggcggaggttgcagtgagccgaggtcacaccactgcactccagcccgggcaaccagagtgaaactctgtctcaaaaaataaatttaaaataaaataaaacataggaagtgttcaaatacatgctagaaataatgaggaggaggatatctgaaaagaaaaagtgccaggtatgcacggcagctcacgcctgtaacttcagcactttgggaggccaaggtgggtgggtcacttgagctcaggagttcgagacccctgggcaacatggtgaaatctcatctctaaaaaaaaattagcctggcatggtggcacacatctgtagtcccagctacgcaggaggttgaggcaggaggatcacctgaacctggtgtggtcaaggctgcagtgaatcgtgatggtgccactgcactccagcctggcgacagagagaccttgttaaaaaaaaaaaaaaaaaggccaggcacggtggctcacacctataatcccagcactttgggaggccgaggcgggcagattacctgaggtcaggagttcgagaccagcctggccaacatggtgaaaccccgtctctattaaacatacaacaattagctgggcaaggagacaggtgcctgtaatcccagctacttgggaggctaaggcaggagaattgctttaacccaagaggtggaggttgcagtgagctgagatcgtgccactgcactccagcgtgggcgacagagcgagactgtctcaaaaaaaaaaaaaagagagagagagagaatattaccatttctactggaccataaatggaaaaatatgatgttccctgtaacccccatttagcacccatgccagcagcaggctcccattctggtggagggagaatggggaaatgacttcttaggtctcctatcaacttgggatacctccagatagaaggaccaggggacaactgtacacaggaaatgccggttactctcagcctggtgtgcagagacttctttttttttttcttgagacggagtctcgctctgccgcccaggctggggtgaagtggcgccatctcggctcattgcaagctccacctcccgggttcacaccattctcctgcctcagcctcccaggtagctgggactacaggcgcctgccaccacgcacagctaattttttgtatttttagtagagacagggtttcaccatgttagccaggatggtcttgatctcctgacctcgtgatccgcccgcctgggcctcccaaagtgctgggattacaggcgtgagccaccgcgcccggccggcgtgcagacttcttacgtcttaagagcctcacttcaccggcgagatactcttttacaacagaaatcactttgctgctagcgtgacaggcagaggatccgatcggctgtgtcctccttttctctctttatctgagagatgtgtgtccatggcaagccggcttccatcctaacctgttgctccaaatgctgtcaaacacacagacgactcccaggataaaggacggcacaccaagcttctcttagggtgaacacaaaacaaccactgcccccacaagcctttctccaagggggccgctgtgttctggcagcccccactcctccaccgcacggcggcgggaggcagagtgtagggtgagagtgccggcacaggagcagatggcttgggttcgaatcccggctctgccactttgggtaaatgacttagtctccccacacctcactctcttcagctgcagaatggtctggggggcacctccctgctagggttactgtgtggatagatcgtaggcacgaagggcttggaaacatccctggctcacagttagcactcacacgtgaatacttctcatgtgggcccttccagatgctacttcagaaagtccatgccagggcaacaggccccgcatgcggccctcacgctgcaggggcgtcaaagaggcagcactggactagatggtgatgagaccatcctggtgccgccaaccctgccagggctgggacccagagcagcccacacacggtgcatctcacgccggcgagcaggtcccccctgaccacggcgcatctcacacgggcgagcaggtccccctgaccacggcgcatctcacacgggcgagcaggtcccccctgaccacggcgcatctcacacgggcgagcaggtccccccgaccatggagcatctcacgccggcgagcaggtcccccctgaccacggagcatctcacgccggcgagcaggtccccccgaccacagagcatctcacacgggcaagcaggtccaccctgaccacagcgcatctcacgccggcgagcaggtccaccctgaccatggcacatctcacgccggtgagcaggtccaccctgacaaaggaaagggagagcccaggagtgtccacttccagcagtggctctgggtgcggcaaaggcacaaactggacaaaagcagcaatccttctgattaaacctgttctacatccttccaattacacctgctctaggtggcgcacggcggctcacgtctgtaatcccagcactttgggaggccgaggtgggcggatcacctgagctcaggagttggaggccagcctggtcaacatggtgaaatctgtctctaccaaaaaggcaaaaatgagccgggtgtggtggcgcatgtctgtaaccccagcaactcaggaggctgcggcaggagaatcgcttgaacctgggaggcagaggttgcagtgagctgagatcccgccattgcactccagcctgggcgacagagagagactccctctcaaaaacaaaacaaaaaacctgctcgacacccttccaattaaacctgctcgacatccttccagttaaacccgccacttcatcaaggaaagaaagacattttcccggctagcactgatctgtgggcccttctttttcaaaatgggagatggcagaattttatacagaaacagtcgctagttccaaccagaaagcccagagacacaggggagccgctggtggccacacaggtgaagcatgaaaggctaagaaatggaaatgcagtgctgcacatggccgggagcccgggtccggctgtgggctgcagttccgtgatcccggcggggaaggccacgtgggttactggggaggatgaaggatgaacacggggccgcgtctcacatgcaacccaccttcgaagacgccaaccagaggcacctacggcacatcccgagacacgtgggggcccgtctcctcctccttccaggagtcactccccaggcaacttggctactaaacttccgttcagaaagtgcaccttcagggcagggtgcagtggctcatgcctgtaatcccagcactttgggaggctgaggcgggtggatcacctgaggtcaggagttcaagaccagcccagccaatatggtgaaacccccgtctctaccaaaaatacaaaaattagctgggcgtggttgcacacgcctgtaatctcagctgctcgggaggctggggcaggagaattgcttgaacctgggaggcggaggttgcggtaagccgagatcgcgccattgcactccagcctgggcaacaagagcaaaattccgtctcaaaaaaagaaaggaaagaaagaaagagagaaagagagaaagagagaaagagagaaagagagaaagagagaaagaaagaaagaaagaaagaaagaaagaaagaaagaaagaaagaaagaaggaagaaagcaagcaagcaagctgcaccttcagactgaagtcaatgaacaacaacaaataactgaggttaaaataatggccacgaatgaagagacaaacacactgatgtttacttctcaccctttcaaatgtgccgaacgcaaagtatttaatgacgcccgttggctgctggcgtggggagtccggttccccgacacagggaacgcgatctcatctgtaacaccaattaaggaggttcattgactgtgccattcgacttcctgccctcatggctccgcgagccaggagatgagcagttagctgggagcacaaacggcatatggctgccaggctctttctggccgacaccacagacggagggaaaggctgtttcccccatgctgcagctctcgcaagctgacagaagggatttcctaaagccccatctggtatgaaagcctccactgggcagagtggtttgggacagcaagcgggtggctggtaataacaggctagggccatatgtgctcaggagagatcttaagaagcggctgggagtttgcataggagggggagtgaggagccagcgtcgatctggagtcaaagggaccccatcccagaggcagtcacttctagtgggggatagggtttctgtggcttgcagccttgtggatctccctgctgacattactaggaaagagctcagatgtgccacgctcactctgagtagcacctttcgacgtgaacgttgggaccctgacctgcagcgtctttgggagatgggccatcacacgggttcgacccagaatgttaagttcattcacaaagagaaacaaatctgaacgttttcactccagatctttccagaacccgtgagactaagaaaaaagaacaaggaagaaaggaggcataggaatgaggactccgtggagggaaaacggtcattccctgtcgctttggggaatctgctgcaaaaacacgcctgtccaggccatcatacgtcccgtcccgcccctccttagctggaaggtggagaccaggcggtggagaccaggccattctacgtgccgtcctgcctctccttaactggaaggtggagaccaggccatcatacatcccgtcctgccctccttagctggaaggtggagaccaggccatcctacgtcccatcctgcctctccttaactggaaggtgggagaccaggccatcctacgtcccgtcccacccatccttagctggaaggtggcggccaggccatcacacgtcccgtcctgccctccttagctggaaggtggagaccaggccatcatacgtcccgtcctgccctccttagctggaaggtggagaccaggccatcacacgtcccgtcctgccctccttagctggaaggtgggagatgtcaccagttcaccctaaccccagcccatccactcctgtggctcggaacaagctatgaggcgatcgcatgtgaaggccaatgaaaggactttgcaaaaaatacaaatatatggtaggtttctacgtacaaggtttctttttttcttttcttttttttcttttttttgagatggagtctccttctgtcacccaggctggagtgcagtggtgcgatcttggctcactacaacctccgcctcccaggttcaagcgattctcctgcctcagcctcctgaggagctgggattacaggcacctgccaccatacccggctaattttggtatttttagtagagacagggtttcatcatgttgcccaggctggtctcaagctcttgaccttgtgatctgcccgcctcggcctcccaaagtgctgggattacaggcatgagccactgcacccagcctgttttttttaatgaaaacaaaaatccatgccaagatgcctgaaaacagacctacccccaggagacagggtcagtgcaggtgcccgaggacaggacaccagggctcatcccagcaccccagagctccaggctgattttctagtaatttccaacatagcacttgactgacacgtccagcacagactcacagcacgggagagaactcctaggaccagctgctacagtgagaagctccagtgagaaaggtcaacttcataaactatgggaacacgggaggtgatccactgaattgagagtgagagagaattccacccttctagagagaattccacccttctagagagaattccacccttctagaatcctaccatcatcaatcacccttacagactcaacatccgagagagaattccacccttctaaaatcctaccatcatcacccttagggactcaacatccaagagagaattctacccttctagaatcctaccgtcatcacccttatggactcaacatccgagagagaattccacccttctagaatcctaccgtcatcacctttagggactcaacatcagagagagaattccacccttctagaatcctaccatcatcacccttacaggctggacatccaaagaccatctcacctctccctcataagacgaggcccttcagggtctacatcttagaccactttgtatcttcagtgccttacacgtgagagatactcaataaatggggatgctgatgatgacagtcaggccaatcagctggatgctgatgtgtgctaccagctcctcacatttgacctggagacacagcctgagccataggcaggcggatattccattttcacacatttgtcatggttcctcagcagaaaagaaaccaggcaaatacgccgggtgtggcggctcacgcctgtaatcccaacacttcgggaggccgaggaggaggccaggcggtcaggaatttgagaccagcctggccaacatggcaaaaccccgtctctactaaaaatacaaaaattagccgggtgtggtggctcatgcctgtaatcccagctactcgagaggctgaggcgggagaattgcttggaggccagagaatcacttgagcctgggaggcggaggttgcagtgagccgagatcacaccactgcactccagcctgggggacagagcgagactgcatctcataaataaataaataaggttttaaaaattaggtgttaggaataatgctcacaattttaaggaaattgccaggcacggtggcttgtgcctataatcccagcactttgggaggccaaggcaggtggatcacaaggtcaggagttcaagaccagcctggccaagacaaccccatctctactaaaattactaaaattagctgtggtggtgggcgcctgtaatcccagctgctcgggaggctgaggcagggaattgcgtgaacccgggaggtggaagttgcagtgagccaagatcgtgccactgcactccagcctggcgacagagagaaattgtctcaaaaaaaaaaaaaaaaaagaaaagaaaaaagaaaaaaaattttaaggaaattgaacacacgaacaaaggacttttagcaaagcagttttatttttgcacagaggggtgcccctttggccagtcgccatgagagcacacctgaacaaaggggcacaaaagccttcattcctgacacaagtcctgcccctgtaccctttttttattggccggagtcgggtcttataatataaactaatcccagttggataaacatttgatttttttttagatagggtgggtacgttaaagaaaagtggagggaaaggggaaggggtgtctgtaatgagccagaaagttagtctttctttaaataaggaaaggaatgtgagctggtactgataacgcttggtactgtggcatgctgggcacttaacaaaggcgagaagggaaaaggagaaaaaaggagaaaaatggtgggggtggaggggtacaatgaattaaagaataaaagattgatcagattatttgaagagaaacctcatcatatcccacatagtcaaatcatctcgaaactttccgcagcttctggtagatgaggaatgtgactacgtagcgcctaccgccccaaatgctattataaattccaagtcggcagggtgagcttttccgtgtccgctctgcaaaatgaacagaagagcaggaagtgtggttggtgggaaccacggagatgtttgtcatctcggcaccgtccgtacctgtccccccgcggagccactagcactcggcacagctcccttctcaatttcctatttgattgttatttcacaagggctttttttttttcccttctcggctgcgtggaaagctctgtttcttggcagaactttccagtgcccagttataaaccccgtgttgatcactttcctgcttcaggaagtccccactgagccctgggccaaatgacaaggaggggagaggaaatatttacaatgatgtgagaaactcccagcctggaaaaagagatcaaagaaaaaagtcagaagggaccgttctgcacggagcctggcacgtgaaggctttctctaaattggcctggaccggtccacagcggtaatgtcacctcactgggaatccggcaagccaggcgtgtccacagctctgcaaacagcctcagccccactgccacggaccagccacgtccacagcaaaaggaatcgtgtccgacactaagaaactgtgaccacccagtaccaaagatgcctttatatagaaacggactgtggcttgcattctttccctccaccagctcctgaaatgaaagggttccgtcacacaatgaaataagtaacagcagggagagagagagaggggaggtaaattgtttggaaagtagaagacagggtggaaaagatgaaattcaagacagatgtgtgagacccgcaaacatatgtctttgaatttatgcatccaagtgattgatgtagaataagaaaaaacagctacaagcccaataaagaaataaatataggagtaaatacagaacaaagtatcacgttccccacttcttccagaccaacatcaattctcgtctctctttctgctacataaagttgttacaaaacggggcgagtgaaggatcgaagatgaaacactacgaattaagcagaggttctctgtggtccctgacaccctcaggaggacgtcaacccctgacgattcatttccaattactgaacgttgatttcctgttttgttttttttttgagacggagtcctgccgtgtcgcccacgctggagtgcaatggcacgatctcggctcactgcaacttctgcctcctggcttcaagcaattctcctacctcagcctcctgagtatctgggattataggcacccaccaccacgcccggctaatttctttgtatttttaggagagacagggtttcaccatgttggccagggctgggctcaaactcctgacctcaggtgatctgcccgcctcagcctcccaaagtgttgggattacaggcgtgagccactgcgcccagctgatttcttgtctctaaaaggtactgctacggcttaacacgagcaggatttaaaaaatagtagcatttgccaggttcgtgcctggtcattaagaaaaaataaagcaggaaatttagatgggcgtttccatcaaaacacaaagtccaaggctctggccggaaagccatttttacaatgcagtcagtattcgtgcatgtcactttacttccaaacagcgaactcaaaggggccaccacacgattggttccaaatgcctcctactgagagacacaggcagcttgcctcctggttaccttctctgtttgcagattcagaagctaacaagaaagcggacagcagcaggaatggccctggatgtcagatgcatcagacagagaggctgaagtgtggtctgaggacagatcgccaggggtggtggagatgacggaggtttttctggataggccaagtacctatccactgctcagcaggacgtcggctccataccacacatgtgcctggtcctttttcatcaataaacacttattgagcatctcaaacctaccaggcatttgtgccagacggtatggggtcagatcaagacaaaggtcttcgccttcgagaaaggaagggagcctgtctggtatgtaacaggctccggcttcctctctagaccctcccctgggacggcagtccccaccccacccacaccctttgttccacggcaggcaatcatggtgggtgtgcacgcttgatctaagaccaatcacgctctctcctggaagttcagaaagtggatacaaagacggattcactaagaccagagcttcccagctgggcgcagtggctcacgcctgtaatcccagcactttgggaggccgagacaggtgggtcacctgaggtcaggagttagagaccaccctggcaaacagggtgaaatctcatctctactaaaaatacaaaaattagctgggcgtggtggcaggtacctgtaatcccagctactcaggaggctgaggcagaagaattgcttgaacctgggaggcggaggttgcagtgagctgagatcgcaccactgcactccatcctggacgacagacaaaaaaaaaagatgggagcttcccaaccagcgtgctaggagcaggctccaggagggcaccgcactggccctctcagcctcaggggccgctggactccctcttccctccctccacgtccttgtcctctggcggccagctgcctcatccctttacctccgcagacaagcaatcatcatttcctaaacgtggcaggatgcagagcaggtagaggagtgctgaagagctgacagtggaggtgagaaccataaactcacgtcaagggcaggcaggggtcgccttgctgggccagggacagcagagagaaatggagctgacggagaggaggacagataaggaggggcaggagagacaccagagtcagagaggagcgaacgagagaagctgcagagcccccaaggagcccgagagcgacctgctcctgaaaccccaggctggtccctccgcatcccagctgggtgccgttcctgcatctggaggcccctgtgatgaaggactgtgttcggagagtctaactcaatccacctaaggcagctggagtccatttctgctcctcgtaaacaactcctaactaagacaggtacgtgggtctgtgtgtgtgcgtggagagtccaagcacatcactaaatcctcactgcttagaacgccagaaaaagaaaagcaaaatcacctgacggacgctctcagccctttcaaatccctttctcacggatcattcttctgtcttccccacgagccccagggcctggggaggagacacctgctcctgctcccacgaggtacgaggtacgcagaggaaggagcaagatgatgccttcagacaagggagcaaatgagcttcccggacctcctgcttcctgcagccagcagcccatttcttaagtgggagcctaagatacacaaacgtttcacatgtgtgtggacatgagaaaagtcagtccactgctccgacctgtgggtccaaggaaggtggccgtgagcaaactcacaaacttgccaagaaatgccattttgtgagttcccaaagtagggctcttcctctgggaaggttttgcaagctcactgtctccagtggggctggggggcacccagttttgctcactcgctctctccaggggggcggcgtgggggccccgggagctgagtcaggagggacgaaggcgggaggtttcttctgcagacaagatgaatggccacacgtcccttagagcacactcccgaggtagaatcacacacatgatattcagaagcaggcacagtacatcttccccaactttagttttcaaaggcagttcaatgagggggctgccgttggcggacactccccggccaggtgtgtgctggttccagatgccgccagtgccacagaaccaagacgggcagagggtggagtttctgaggcggcaacgagacttgaccttctcctccaggacagaaacgtcccagtgaatcagacccggacgatgccactactcacttgcttaggaaacttaaaactgctgaggccttcggaacagaaaccacacacaaacagcttctccgtcgggagcacagcttcctgggacaggctgaccgctttaaagagcatgataatcctgtcaacgtttagcagaaccgaactgctaaacatcaacacgtttcaacctggtctccagaccacccagagaaaggtctgtgtccaaaagccgggggatgcggtggggaggccggggcccagcaagcctgagctccgcttgccacttggctccagctccacccaaagttccccggctgaaatgaagacgccaggacaaaagacagcgcaagcctctgcctgctcccaggggcagccttgggctgcagacgggagagaagatgcttagaaggcatgagcgggggacgggaagcagaggggctgaggggctacagaatgaatctgaggtcactgtgtccgccggccacaagaaagggcaggtggaaagagcagggtggcaaagtcagccaggctgggaacatcccttcacctctttgagaagctacttccgctgcacactgggagaaaccagtgcttgcctcataggcttgctatgatgaagccagatgtgaaatccagatggctgctcccagcacccagtttccaagctcaggcgtccacatgtatcatttacaatttgcgccctcctcactccgatgcttatttacttattttgctttgaatagactccttcaaaaaattattttgaaaggaaactttatattgctattgtaagtggagaaccagcaccactcgccataaatagaggctaagtgtcaaaatgaaaagaacaaagaacaagccattattacaagtgatctgtctcgcgttgcctgcggaaagcggaggtcggctttctctatggaagggagattagcaagttttccagtggtttaaagatggcgccacagcgagactttctcctgatctaaccagagacttgaaatggagagtggaaaaagctggaaaaagcacgctgtagctcaattaggggcgccagtctcaggaacggccctgccaccctaatccctcaggtcctgtgccaacggaggcagcagtgagaaaagggagctagaatcctgtggccctggcttatccctgcatgccggccaaggccccgcagcctctagaaggctcttggccaaacagcaatccctgctggcttagtcccagctcttctgccatccgggggcatccggatgacacctcctcacaagtcccatcagcgagaacctgcctcagccacagcctcagcctcagcctcagccacagcctcagtcggggcgtctccagcagggaacctcattaagctccccactgaccaggacgtgggccacaggatccctgggaccccccgtgcccacagctggcatcttgctccccaaactcaaccctgttttctctctcctttctacctccagaaaaagtcaggatggattatgtagacagacttgcctctgaatgtccatactgacgtccagaaaatttcaggggaggggaaaaaagaaaacccaacacttcctttcctttccagctcccagagctccgagttggtgttggatttggatacggggctcctggaagcggatatggagcagaaagtagggctgggtgggtggaggagggaggcaggacccccgtctgctctctgagtcagcccgggctatagagtggggccaggtccccctgcacggttgggattatgcgtatgccaagcctaaccgtcctgtccttacaaaggaggcctggagctccctccagcacaaatcgcaaattgggaagaaagagcttgaccagaagtgtttaatgcagcatttcctcaggaccactgtttccccaggatgcctatttccccaggacacctcagagtcccagggactcatgcagatttccaggccccacctctgacccactggatctgacccaggggatgagacctaaagtgtaaattttttctttttttttttgagacagagtctcactttatcacccaggctggagtgcaatggcgcaatctcagctcactgcaagctccaccccctgggttcaagcgattctcctgcttcagcctcctgagtagttgggaccacaggcgcccaccaccatgcccggctaaaaacataaatgttaagaaaattcccagccgggcacggtggctcacgcctggaatcccggtactttgggaggcgtggatcacctgaggtcaggagtttgagaccagcctggccagcacggtgaaacctcgtctctaccaaaaatacaaaaattagccgggtgtggtggtgcacgcacgcctgtagtcccagctactcgggaggtggaggcaggagaatcgcttgaacctgggaggcgcatgttacagtgagccgagatcacgccactgccttctaacctggctgacagagtgagactctgcctaaaagaaaaaagaaagctctcaggtaactcaggcccactgaagtctctttcccacagggtgtccctctgtccttactgtgtgtccctcgccccagctaattcttcctcaccctgcagatatgaggtcaaacatcagctcttcgggggagccttctctgcccaggacctccctcccaagtttagaccaggtgctgtatacatgtccaagccctagtactcttcctttacagtacttctcactatttctgttatacacatatatatatatatatatatatttttttttttttttccaagacggagtctcactctgtcgcccaggctggagtgcagtggtgcgatctcggctcactgcaacctctgcctccccgggttcaagtgattctcctgccccagcctcccaagtagctgggattacaggcacccgccaccacacggctaagttttgcatttttattagacacggggtttctccatgttagccaggatggtcttgatctcctgacctcctgatccacccacctcggcctcccaaagtgctgggataacaggcgtgagccactgcgcccggccaatttccattctgtagttgtgtgacttgttgaatcatgtgtgtccccccactggactacaaagctccacgaggccagggagatacttagctcactctgcttctggcatcaggcatggcacaaagtaggcttgcagtaaaaatatctgtggattaaacgaatgaatctggaatagctgcttctaattcccgcttcccaccgtactcgctcttctcactaaggttttctggacacctgaaagcaggtacttcgaaggaaagatcctgccgctagaatatttttcagttagacagatatagaacgatcccacctgctcacctgagtggagatttaagagtttaaaatttcagccgggagcggtggctcacgcctgtcatcccagcactttgggaggctgaggcgggcggatcacaaggtcaggagactgagaccatcctggctaacacggtgaaaccctgtctctactaaaaaaaaaaaatacaaaaaattagccaggcgtggtggcgggcacctgtagtcccagctacttgggaggctgaggcaggagaatggcatgaacccgagaggaggagcttgcagtgagctgagattgcaccactgcactccagcctgggcgacagagcgagactctgtctcaaaaaaaaaaaaaaaaaattgcagccgggcacggtggctcacgcctgtaatcccagcactttgggaggccgaggaagatggatcacctgaggtaaggaatttgagaccagcctagccaacatggtgaaaccccgtctctactaaaaatacaaaaattagctggatgtggccgcaggcacctgtagttccagctactcgggagactgaggcaggagaattgcttgaacccaggaggcggaggttgcagtgagccaagatcacactactgcactccagcctgggcaacagagtgagactccgtctcaaaaaaaaaaaagactttaaaattttttatatagaagctgagtgcagaggctcacacctataactacaagcactttgggaggccaaggcgggagggtcaattgagcacaagagtttgagaccagcctgggcaacatagcaagaccccatctctacaaaaagtaaaacattagctgggtgtggtggagcaaaccggtagtcccagataactgggaggctgagaagggaggatcacttgagcctaggagtttttgaggctgcagtgagctctgatcacgccactgcattccagcttgagctacagagcgagacgttatctcaaataaatacataaataattctcatatactaacaaagaataagaagagaggcagcctttgaatcccccgggtctgatagcgcccaaggggctccaggacagctttgctcagggttacaagcagagggaagtaaatgttttccacccaatccaagatatcttctttgcggctagtaaaaacttgactgctccccaggatcaaaatgtgggtaaaatttcccccagatttatctcttaagttctattcacgaacaggtttgttgaaaagttttgtttgaattagcagaactctctctctctgaaaatacaccccagaaggaagcagtcctcccattctccagcaagtacaggcaaggtcccatctgatccaccagttctggcagccagatacccacaaatgtttagctctgccatgggatatgtagaataaattaagtttaggggaaaaaatcataaaacaagcctctgagtctaaagactctgtgtaccttggcaggaggaatgtgtgtgttacaacaaactctatccagtgtgccagggaactcaatcaaaaccagcagaaaatgattcctgtcatgggacaggcaactccacagccggcccctgggggagatgaagataagagggtccaatctaggccgggtgccgtggctcgcacctgtaatcccagcactttgggaggcctagacgggcagatcacgaggtcaggagatcaagaccatcctggccaacatggtgaaaccctgtctctactaaaaatataaaaattagctgggcgtggtggcacacgcctataatcccagctactctggaggctgaggcaggagaatcgcttgaacccgggaggtggaggttgcagtgagccaaggtcgcgccactgcactccagcctggcaacaaagtgagactccgtctcaaaaaaaaaaaagagggtctgatctctccttgcatttgccaaaaatattttgcatcatggccgaggacagaaaaagcctaaaaccctgagtaagaggagacggacattctaaagtcaaagcctctgcaaacacaaaacaaactccacaggaaaacttgctcatggaggtctttccctctgggactctggctggatgtcttccgctaggagatgagtcttaagtcactgcagggcatgctttacaacgggagtctgtggataaagtagggctccactggtcttgctaagtacttgtctttttttttttttttttttttgagactgagtcttgctctgtcgcccaggctggagtgcagtggtgcaatctcggctcaccgcaacctccgcctcccgggttcaagtgagtctcctgcctcagcctcccgagtagctgggattacaggcacccaccaccatgctcagctaatttcctatttttagtagagacggggtttctccatgttggtcaggctggtcttgaactcctggccacaggtgatcctcctcccaaagtgccgggattacaggagtgagccgccggccacgcccagcctactgttcacatttctaccagtatcctgttcacactgcctaggttttctccaagacagctgaggctttctctacagctctcctcttttctttctgagccctccccggaactgcctttcacattctgttcagggcaacgtaggccttttccatcatgaacctcaaaactcttccgacttctacacgtcacccagttccagagctactcccaccacttcaggtatcagttacagcagcacccccacttctcggtaccaatttatttctgtctgaatccattcaagctgctacaataggacagtgcagactgtgtggcttaggaacacaaaagtttctttctctcagttgtggtgggtggaagtcgaaagtcagggcaccagtggactcagtgtctggtgagggcatgatcctcacagatggcgccttcttgctgtatcctcacatggtggacgtggtctgtcttggaccttttcttttttctttcttttttttttatgagacggagtctcgctctgtcgcccaggctggagggcaatggtgtgatctcagctcactggaacctccgcctcctgggctcaagggattctcctgcctcagcctaccgagtagctgggactacaggcacgcaccaccacacccagatcatttttgtatttttagtagagacggggttttgccatgttggccaggctggtctcgaactcctgccctcagatgatctgcctgccttggctcccaaagtgctgggattacaggtgtgagacaccacacccagcctaaacaccaactattctaaagctgaagttaaggatttgtttaagacatacctaaaactaccgtgaaaccttcagttttcaagaatattctaaaaagctgagcataaaagctgtagctctctttctcaatggtcaccaccatcccagatatcaccagggccatcaaaatagggcagggggcaagcatcctctaagtggaattcttcaccgatacctggtagagacctcctctaggtggcacgagtatccctcactaaataacactgaatagaagagtgagaaggttattccttttgtagttttctttcggtccttccaattactttaagagaagagtcttgctttgatgtcaataaattactaacgtttctctaacacctgctcatcttcctttttaaccaaagatataaatcttttttttttttttttgagatggggtctcgctctgtcgccccaggctggagtgcagtggcgcaatcttggctcactgcagcctcgacctcccaggctcaagtgatcctcccaccccagcctcccgagtaatggggtcacaggtatgcaccaccacacctggctaacttttgtatttttgtgtagagacgacgtttcaccatgttgcggctaatttttgtattttttctatagagatgaggttttgccatgttggccaggctggtcttgaactcctgagttccagggatccacccgccttggcctcccaaagtgctgggattacaggcatgagccaccacgtccagcctaaatctaaatttttaaaatgagtatatttaaagaaaaatgtaagtaaatggtaatatagctggtattgacatgaaagaaccacaaaggtgatactggacggctgagctatagaaaacagccctacaggctgggcgcggtggctcacgcctgtaatctcagcactttgggaggctgaggctggtagatcacgaggtcaggagatcgagaccatcctggctaacacggtgaaaccccatctctactaaaaatacaaaaaaattagcctggcatggtggcgggcgcctgtagtcccagctgctggggaggctgagacagcagcctgtgtgtgaacctgggaggcggaggttgcagtgagacaagatcgcgccactgcactccagcctgggtgacagagcgagactccgtctcaaaaaaaaaaaagaaagaaagaaagaaaaaaagaaaacagccctacggcttacacacgaagggtctgagatgctggttctcaggatcagctatgaccagaggaaacttgttagaacagattggagttcctgctcttccctcactctgttaatttgctcgattgccctcaggcttctctttctatcccatagccagccaagagcaggcaggggccaattttctgggtttcttgaccctactttgaaggctctctggcatgatacaaatggatcccatccaccaaggaggaactgacaacatgatttactattggaaggatctggttcgaaggccatggcacctccactgtctgggagagtatctttaccaaaaaaacttgccactcaagaaacggagcaagctattccaggaaatactttcagatgcagtttcccgtccagctctagtttgaaaatgaggccttctcagtctgagcccacaaccatatttcatgggccccctccctgagatgtgtttatccacgctgaccgatagttcaaagcggtcgtttggaagtggaataaagagtcgctctctaaattcaccaaaggagttaagaccaggaatactggagcgattccgactgaggtcacggggagtttaggggaaatttttggtttgggttttctcctagttttaattgcttataaaagctccttaatgtcaagtaaagaacaacaacaaatgtgaaaagttgacttccccaagacgtttattcaaaagaaaaaaaaatggttcccagcaacccttatgcaggagggaggggattaggaccagataatcttgtatgaaaaggaaagggaaacgcaaactactcaaatacaaaacaacagctgcacggacgggcctgccagagaaacaactgatctgctctgtcacgacctgtttcacggatcccagatctgctctggggacaccacagtcagctccactcccatcaaacgcgattcaatggaccatccaaaccaaactcaggctgcttccttctctctgaaaggcctggccctcaggccgttccagacaccccttccctgtcctccacggggtactctgacttttcataggtgactaaacaacaggcaaaaccgagcaaattaacagagggaagagcaggaactccaatctgttctaatgtgtctcctctggtcatagccgatcctgagaaccagcatctcagacccttcctttgtaagcatcaagcaaagggcccagggcagagaggtgtgggttacttctgcagtaaggaagttggaaagggtgagtcagaagctaaggaaaacgctcactcccggcagtgaaagtgagccttctctttgtatattatgttatatacttttaactttaaaaaatttattattattattattattatttaagacatagtcttgctctgttgcctaggttggagggcagtgacctgatctcagctcactgcaacctccgcctcctgggttcaagtgattctcctgcctcagcctcctgagtagctgggatgacaggcgtgtgccgccgcgcccggctaatttttgtattttccatagagacagggtttcgccatcctggccaggctggtcttgaactcctgacctcaggtgatccacccaccttggcctcccaaagtgctgggatgacaggcgtgagccaccgcgcccggctaatttttgtattttccatagagacagggtttcgccatcctggccaggctggtcttgaactcctgacctcaggtgatccacccaccttggcctcccaaagtgctgggatgacaggcgtgagccaccgcgcccggctaatttttgtattttccatagagacagggtttcgccatcctggccaggctggtcttgaactcctgacctcaggtgatccacccaccttggcctcccaaagtgctgggatgacaggcgtgagccgccgcgcccggcctgcatagttttgacttttgaacctcgtaaacattttacttttactaaaagaataaaatcaagtcaaaagtaggagcaaacagcaaatcctaaagtttaatatgagcagaaacatgtgaccctaactctaatagtaactattacctatctagacaaaaaggcaaataatttaagtgacttttggatctagctctctgactattcctcctttcttggatgtgatctaaggacaaaaagaactgaaaagaaagtttgaacttgacttgttaggatcactgctggccatgattacggatgttgcaaatctgtaaacaaggttatcacagtgggatgagaggaacacagatacggactggggaagtaaggaagggccctgggcagctggttctgagtgcaacatatcagtatcaactcaagattttaaaacacatttaaatttctcagctctttcttttttttgagacacagtttcactctgtcgcctgcgctggaatgcagtggcaccatctcggctcactgcaacctccgcctcctgggttcaagtgatttgtgtggctcggcctcctgagtagctggggttacaaacaagtgccactatgctcggctaatttttctgtttttagtagagacggggtttcaccatgttggccaggctggtcttgaactcctgaactcaggtgatccgcccacctcggcctcccacagtgctgggattacaggcgtgagccgccgcgcctgaccattctttgctctttctattgaaagtggctagaggcagtgagaggcccagcaaggaacacacttcatgaccagatgttggtttctaaggaccatccctccaccaaagggaaggaggatttctcagaggaagagctgattccaagactaggggagggagaggccaagctgagcctgaacgtctcactgagtgccagaaaagcaagcaaatgcttacacgatgctgggaacatgttaaaagactcaagagccatcttgaaaagactcctacttaccaaatttgggatacggtaaaaaatagtgaatttaataagctacagcaatagatttttttttttttaatccatgagtctgaaatgatactaaaaaatggagtggaagaacatgaggggctctttttttgttttttcttttaaattgagacagtcttgctctgtcgcccaggctggagtgcagtggcatgatctcagctcactgcaacctctgtctcctgggctcaagcaatcctctcacctcagcctcccaagtagctgggattacaggcatgaaccaccatacttggctaatgttttgtatttttgatggagacggggtttcaccacgtttcccaggctggtctcgaactcctgagctcaagcgatctaccagcctcagtctcccaaagtgctgggattacaggcgtgagccaccgtgttcagccaatgaggggctcttcataaaggaatgtgaggtaataaatgtagaaggagtgacaatttaaagcccaggattctgcaataatcaatgtagaaacagattcaggaggccaggcacggtggctcacacctgtaatcccagagctttgggaggccagggtgggaggctcccttgagaccaggaattcgggatcagcttcggcaacatagtaagaccccatctcaaaaacataaacataaaaataaaacttaggtgggtgtggtggcccatgcctgtagtcccagctactcaggaggctgaggagggaggatcgcttgaatccaggagttagaggctacagcgagctatgattctgccactgcaacccagcctgggtgatggggcaagaccctgtctcttaaaacaaataaaacagattcatgaaagaatcatcacatatcagtggatgtgaagccactgggtaacaagttactgggaggagaacattcctacggtcctaaagtatcacaccacttactgctcgttagttacaaaggagaaactacctttacaaagtagagtgatctggcagacattagctcaaccaaatgtttaacctcagcatcatcaataacaggacggaactatgatgtggctcctggtgagatgcaacaggagctctgcggcattcctgccagaaatgtttggcctggatgtaatcacgagggaaccatttgacaaattcagactctggaaaattctgcaagacaacagacctatgctctaaacgtatcaatgctacatttcttgggtatgataacggtattattgctaggaagagaacacccttgtttttaggagataatgaaggtttaggaatgaaatatcatgataaatataatctattttcaaatgccccacagtatactcaggggattggttctgggacccccacatattccaaaatccgcatatactgaagtcccacaatcagcccagcagagcctgagtgtaggaaaaaccagcctctgcatacatgggtttcacatcctgcgaatactgttctgtcttctttgtttttttgagacagagtctcactctgtcacctgggctggagtgcagtggcgcgatctcagctcactgcaacctccacctgggttcaagtgattctcctacctcagcctcctgagtagctggaactacaggtgcccgccaccacgcccagctaattttttgtatttttagtagagacggggtttcaccgtgtgagccaggatggtctcgatctcctgacctcatgatcagcccgcctcagcctcccgaagtgctgggattacaggtgtgagccaccacgctcagccgtgttttgttttgagacagggtctcgctctgtcccccaggctggagagcagtggtacaatcacatctcactgccgcctcaacctccctggctcaagcgatcctcctgactcagcctcctgagtagctgggaccacaggagcatgcctccatgcccagataatttttaatattatttgtagagatgggggtctctctatgttgcccacgctggtcttgaactcctgggctgatgcaatcctcctgcctcaacctcccatagtggtgggattacaggtgtgagcctctgcacctggctgacactgtatttttgattcacatctggttgaaaaaagtccacatacaaatggacccttgcaattcaaatccacgtcattcaaggatcaactgtccttcagggaaaaaacatacccactgcttacacagagctctgtagaggtttatgtcaggctcatacagtgtgttccccagatcagcagcagcaatgcctgggaactgagtgaggaaacacgttaaccattgctcagtttcggtgaaaggacacagttaccgttgctgggttccggtgaagggacacgtctgccattgctcggttccggtgaaggggcacagttaccgttgctcggttccggtgaaggggcacgtttaccgttgctcacttccggtgaaggggcacgttcaccgttgctcggttccggtgaagggacgcgtctgccgttgctcggttccggtgaagggcacaggatgggcattcatggtacttgtcttcaacttttctgtaggtctgaaatttcccaagataaaaagttcggagtagggagagtaagtcttaatccatttccttctcagggaatcaaaaccacggttcttcagagtgttgattcttaaatttgccaaaacgtaggggagtgctagcttagatccatctgtgttccctagttccatgtcccatgggacaagacaccagcctcaacggtattaggtcaggagggcggattgcatggaaagaaacagaatcgaggaacaaagtgggctctgcccgttcaaacggctgccctgggagtacaggctgtttctccctgataaacatcggtgagaccaacatgagtgtgaggctttgcaggaacttgccctgcatttcctccctctccagataattctctggtctaacatttcagaaggctttttaccagactcaccctgagatcctttccaacctgattataagagaaaccatcatgaccccactgctcactctgaggctcctctaattaacggacctctaaggaatgtgtttggcattaaaggggcagaggtgggtaaagttaaggaagctgctgcaaatctcctgaaaacggaggcaacccaggcggtgttctgtcagtctgctgcccaaggaagggccagatgccctgaacccttctctctcattcaacacggatgaaaagataaagaatccagaaactaaagggcagattctagaatttacctcctgcttaagctgtcctggcagtcaggctcctggatctcggaactagaaccacgcctggtttatgtaaaatcaggagatgggactaaacagatcatctcgtccacactgattgaacagaggagaaaagcacaactcccagaagtcatctttctcgctcgatattgtccatctcccctccctgtgctccttcagtggaagcgcattgggtgatatcctctgtattaggtagcaatgttttctgggcaagggaaactattggtattacaggctggctgacaaaagctggagttacacttttttttttgagacagagtctccctctgtcacccaggctggagtgcaatggcacgatcttggctcaccgcaacctctgcctcctggattcaagtgattctcctgcctcagcctcctgcatagctgggattacaggcatgcaccaccacgcccggctgattttgtatttttaggagagacggagtttctccatgttggtcaggctggtctcgaactcatgacctcaggtgatccgcccacctcggcctcccacagtgctggtattacaggcatgagccaccacgcccggccgagttacacattttctataaagcaatgacagtctctcccctccaagaaggaccttggcaatgtctacagaagtcaataatgtccattattctttggcttagcaattccaattcacagatatgcatgtgtgaagtgtgcagagatagatgtgcaacaatgttgctgggcgcagtggctcacgcctgtaatcccagcactttgggaggccgaggtgggcagatcacttgaggtcaggagttcgagaccagcctgaccaacatggagaaaccccatctctactaaaaatacaaaattagccgagcgtggtagcacatgcctgtaatcccagctactcaggaggctgaggcaggagaatcgcttgaacccgggaggtggaggttgcagtgagctaagatcgcggcattgcactccagcctgggcgacagagcaagactctatctcaaaaaaaaagaaaaaaaagtgtgtgcgacaatgtttatcatagtattatttgctacagcaaaaggagaaggaaggagtgaaatatccatttatcaggcagtgggcaagtaaattacgctctatatattcaatagaatacaatgctgttattgcaacaattaaagcaggtcggctatgccgataggaagagactggcaagatattagatttttttttttaaatcagacgtttcttttgtaaatagaacagacaatacccgtcacatacatgtataaatgcacagaagatatttcagaaggatgtatataagaaacttaaggctgggcgcagtggctcacacctgtaataccagcactttgagaggccgaggcaggaggatcacctgcactgaagagttcaagatcagcctgggcaacatggtgaaacgctgtctctacaaaaaatacaaaagttggtggcgggcgcctgtagtctcaggtactcgggaggctgaggcaggagaacccttgtacccaggaggcggagcatgcagtgagctgagatcgcgtcattgccctccagcctgggcgacagagaccccatctcaataaatagataaatgaaccttaagagagaggataggtgaggagttgtacctcagtaacacccttcagtaccatgtacctgttttaagtacgtgcatggagttctgcttttataaagaaagaaaaagtcctggcagcctctaacgttgttcaatttcagcccagaccctatcaagcaaggactttttaactgaatcagcaattaaactgctagatgtggactaatctggtttgtgatctgaaaatacatattcttagtgaaacaaatgatttgagcatgggtcagggcaaggccaacattcaaatactgcaaaccctcagctggtgccagcctcaggctgcgggtcagaacatgtgagtggaaacagttcccaggaaagaaaactgatgccagcttggtcagcaagttctcggggttctccggggaattctccagcttggtcagcaagttctcggggttctccggggaatcctccagcttggtcagcaagttctcggggttctccggggaatcctccagcttggtcagcaagttctcggggttctccggggaatcctccagcttggtcagcaagttctcggggttctccggggaatcctccagcatggtcagcaagttctcggggttctccggggaatcctccagcttggtcagcaagttctcggggttctccggggaatcctccagcttggtcagcaagttctcggggttctccggggaatcctccagcatggtcagcaagttctcggggttctccggggaatcctccagcttggtcagcaagttctcggggttctccggggaattctccagcatggtcagcaagttctcggggttctccagggaattcttgccagtcccttaagattatgctcagagtagggcttgcccagctaccaacatatgctttcctgttgttgaaggagaagttcagcaaaactatgtagctaaatgacacgaaaagttttttctcaaagcctgggagaacagtagtttggcctctgaagaatcccaaacttgtggttaataagagaaaaatagacagtttaacacgtggaagattgaaaagtctaaacaggccagcgtggtggctcttccctgtaatcccagcactttgggaggccaaggcaggtggaacacctgaggtcaggagttcgagaccagcctggccaacatggcaagaccccatctctactaaaaatacaaaaattagccaggtgtggtggcgggaggctgtaatcgcagctactcgggaggctgaggcatgagaatcgcttgaacccaggaggtggaggctgcagtaagccgacagaatgagactccaactcaaaaaaaaaaaaaagtcttaaatgtaccttgcaaagagtgtgcagaagctgttcagatgtaagtgggggtcctgtgtggttgttctgccttgttactaatgaccttcagagtgacaggagcatgacctattccggggacacagcagggacatgtgttgtgctccagcagagcctgtacggcgtcccatgggtcatctcctagctggacactggcaagagttccagagtcatctccctcccttcattcttcaggctgcttccctgggaaccattccccagaactcacctctcctctgtccttcacacatgggattccctctatccgatccacccttccccggaattcccctctcctccagccttcacacgtgggattccctctatcccagccacccttcccagcaatgtttacctgactccagctccttgatgagaatcactgggaaactccctgaccgtatctccctcgaactctcatccagccagcagggtgagggagctcctcctcggctctcacccgcagacttaacgccttcgcgctccccaagcacagaaactaccttgtctttttttgttttttttttggttttttgtttgtttgtttgtttgtttttgagacggagtctcgctctgtcgcccaggctggagtgcagtgatgcgatctctgcttactgcaacctccgcctcccgggttcacgccattctcctccctcagcctcccgagtagctgggacaacaggcgcccaccaccacgcccggatcatttttttgtatttttagtagagacggggtttcaccacgttagccaggatggtctcgatttcctgacctcgtgatccgcccgcctcggcctcccaaagtgctgggatgacaggcgtgagccaccgcacccggtcgaaactaccttctctacatcgtgatcaccccagtgccagcaccgaccctgggccgggcccaccatcccgcctgtgtttgtaggataagtaaatgagcagagaaaggaaaatgtccagatgcacaaaaaggaaacctcggaaatccctgcagccagagaaagacacagaaaacacggaggctgagtgttggagcttcccagggccccgggtggaaggtctcccaggctttctatcactgcagacgccaggtggtggctggggcagattctacccaagcctcctgccttatattaagtcccaccctccacacagatgaacctctagacttgggtgaaccccactgaccagacagttccttctctctcatctcacatcctgcctcctgtttgttaacttcccagcacagatctgtttctctgtaaagggcaggcagcccttacacaccctgggttacatcaaaggccagaacgaaaggccagcacggcttaagagggccgtccagaactggctgctgacaccaacccaagagtgatccagcttctgactcaccaggcaccagctcatgctctctgatccaggagccccgacaagcgacctgaggttccaggggggctgcctgacacatctctgctccgaccaacagggttaggaacctacacagattacgaggtggaagaaggaaggtctctaaagctcctgagctgcaaacaggaccatattggcaaaagctcctgtgtccctgttcacatccacatactttaagtattatttctgcagcatttaaatactttagaaagatactgtaagaatcgctgacatatgtaggtttcaatgaaatcactcagggagccctccccactcgggaaagactccttattacagagcccagttctgtaagttccctggagaaatgagtgaggagggaaggcggacgtggtcagtcataaaatcttgacgctctttttcacttcctctgctcgttcgtgttccacggacagttaacagctacgtcctgccaattctcctccaagcctctctgggaaccagttctttgcctctgatctcggttaagaaccgctgacctgctgcccagagtaaaaggtggcgtgcgagagctctcgtacttaggaaggaaaggatggtgccaggcgcttggtgcttgccttaagccggcagttttcaaccggggggtggttgtgcttcccacgggccatttagcaatgcctgggaacgttcctggctgtcacattgcggggtggagtgttactgacacagtaggtagaagccaggatgctgtccacgttctaccaggcgcaggacagctcctcccacagcaaagaagtacctggctcagaacgtcagcagggccaagaaaccccacaccaagcctctcctgggattattccagtctccatttggcccccagtcactttctgattccagttctccagcccaggaatgcaggacgtggattagagaagcaaagggaaagttcatccagaaagattccggttctgtgagtgttactaacggggcaagcaccttgaaggtaccgtgggacgtgggtgattcatgagcctgaattgtctcactgttatcacgtgatcagagtgaggcggcctaagggagcatcacaggatgggaagggccaggttgaatgaaaaatcctggctgagttcagtggctcaggcctgtaatcctagcaccttgggaggccaaggagggaggattgtttgagtccaggagttcgagaccagcctggacaatatactgacaccctgtctctacaaaaaaaaaagtaataatacaaataattagccaggtgtggtgtcccgtgcctgtagtcccagccacttgagaggctgaggtgggaggactggttaagcctggaaggcggaggtgccagtgagccccgattgtgctactgtattcaagcctgggcaacagagtgagactctgtctggaaaaaaaaaaaaaaagaatcttatccaccccacccagtctttctttctgagcaaatggtttggaatctctcacacttctggtgctacatgcttttatttatttatttatttatttatttttgagacagagtctcactctgtcgcccaggctggagtgcagtggtgcgatctcagttcactacaagctccgcctcccgggttcacaccattctcctgcctcagcctcccgagtagctcggactacaggcgcccgccatcacgcccagctaaattttttttgtatttttagtagagacggggtttcactgtgttggccaggatggtctcgatctcctgacctcgtgatccgcccacctcggcctcccaaagtgctgggattacaggcgtgagccaccgtgcccggctatgcttttattttaagcacggtgatcttcgcagctctcattctggagccacattggcagccaccatgaactaagggagtgtacatacaacctcccaggcaccccgaagctccagggttagaacctggtcactgtggtgacctcaatgatgaggccaacaagtaattgattcctaatatcacttagtgaagttagtaaatggtctgttttccagtgataaatcgcagcatacgcattcactttttttttttttttttttttttgagatggattctcatcgtgtcccccaggctggagtgcagcagcacgatctcagctcacagcaacctccacctcccgggttcaaatgattctcctgcctcagcctcccgagtagctgggattacaggtacgtgccaccatgcccagctaatttttgtagttttagtagagacggggtttcaccatgttggccaggctggtctcgaactcctgacctcaggtgatccacctgcctcagcctcccaaagtgctgggtacaggcatgagccaccgcgcccagctgcatttgcttttgataagtttccctgaatggaaaatgttgatgttacactagctaattgggaatggcatgtgttatccagccctgatccagctctgctgtgttactgatgaacacctaacagttacccgcaagcttgcaaaatgcttttatgaaccacatatcaccaagcatctgcagtgctatttgctttatttcctgggaaactcgggggtgagggattgggggaggaattatcaaaatttggacaaacccagagaagtatgttatgtgtggaatttcagacaccatgtgtgctgtggcaaaaataaaaataaaaaatgaaaaagttgaggactgtgattctaaaacaggatgaggaagaagggcctgaagccataaatggaagaaccagggatgatggagagttcctgcactgagtcctggcctttctgccaagctgccgaatgctcagaggccacgatgctgaacccgtgaatcaaagacaagaggagagggagggagggagagagggggagagagggagagagagagagacggagggagggagggaggaacacatcaaagacaaggagagagacagaggaacacgtcaatcaaagactaggagagagagagagagagaaacatcaaagacaaggagagagacagaggaacatgtcaatcaaagacaaggagggagagagagagagaaacacatcaacgacaaggagacagaggaacacgtcaatcaaagacaaggagagaaagagagaaacacatcaatcaaaggcaaggagagagagtgtgtttgaggaaacaccagcctatggtgtttaatcttcagtgccaacatgagtgagctagagggtaccctgatatttgattaaacatgatcctgagtgtgtctgtgactatgtttccgggtgagatcttttttttttttttttttttttttgagacggagtttccctcttgttgcccagactggagtgtgatggtgcaatctcagctcactgcaacctctgcctcctggcctcaagcgagtctcctgcctcaacctcccaagtagctgggattacaggcgcctgccaccacgtccagctaatttttgtatttttagtagagacgggtttttgccatgttggccaggctggtcttgaactcctgacctcaggtgatccacccgccttggcctcccagtgttgggatgacaggtgtgagccaccacacccagctgagatcaacatttgaatcagcagactcggaatataaagcagactgctctccccagtgtgggtgggcctcatccaacccactgaagtctaaggagaaaaaactaaatagaaaaaactgctgacagggagaattctctctgactgtcttccagctgggacacccgtcttcctctgccttcagacttggcgggaacttacaccatcagttctcctgggtctccagcttgccaactgcagctcttggggcttcttagcttctataaccatgtgtgccaatcctttataagaaatctctttcagccaggtgggtggctcacgcctgtaatcccagcactgtgggaggccgaggagggtggatcacttgagatcaggagttcgagaccagcctggccaacacgatgaaaccccatctctactataaatacaaaaattagccaggtgtggtggggggtgcctgtaatcccagctacctgggaggctgagacaggagaattgcttgaacccaggagacggaggttgcagtgagctgagatcgcaccactgtactccaacctgggagacagagacactgtctccaaaaaaaaaaaaaaaaaggagtctccgtctccttctgtacttctgtacttatattttgctagtcacagagagacctttgagaatatacaacgtgaatatcaacttcttactggaagcttcttttagcatcttcttgagacctccttagctagaaagtctggcaaagtgaagttctggaagctttgtgcatataaataatgataatatcaatgggttggtaggaaacggccttctcagacctatgaaaaaaatatatcctcctacagtttattaaggaaaaatgtttatgccttaatttaaaccatttccctggggggaaagaggagcagttcattaattacataggacagtgagtgagggagtgggggaaacacacgggttctggtgaggatgatcacgtctcagcttcctccatttctccaacatcagctgctcaagacagaatcatggtctttttccagcatctgagccgcccactcctgacatggtttggctgtgtacccacccaaatctcatcttgaattctagtccccataatcccacatgtagtgggagggacctggtggatggtcattgaatcatgggagcagtaaccctcctgctgttctcatgatagtgagtgagttctcacaaggcctgacggttttataagggactcgtcccccttctgctcatccttctccttcctgccaccatgtgaagaaggatgtgtttgcttccctttcccccatgattgtaagtttcccgaggcctccccagccctgtgaaactgtgagtcagttaaacctctttcctttataaattacccagtctcagccgggcacggtggctcacgcctgtaatcccagcactttgggaggccgaggtggatcatgaggtcaggagtttgagaccagcctggccaaaatggtgaaaccccacctctgctaaaaataaaaaaattagccgggcgtggtggcaggcacctgtcatcccagctactcgggaggctgacacaggagaatcgcttgaacccgagaggcagaggctgcggtgagccgagatcatgccactgcactgtagcctgggtgacagagcgagactctgtctcaaataataaataaacaattacccagtcttgttatgtccttacagcaatgggagaacagactaatgcagctcccaggcacaagcctggatcacaatcatgccactgcactgtagcctgggtgacagagcgagactctgtctcaaataataaataaacaattacccagtcttgttatgtccttacagcaatgggagaacagactaatgcagctcccaggcacaagcctggatcacaaaggcagccagtcactactgcacactcctccatgagaaaaccagaatctgttacaggtgaataaataaattactggcgcaaaagacaaaaatgactacagaaaagaacaatttcaaagaaacatatcaacagtgcaattatagaacaccatttaccattggtgaagcactttgtgtcaagcaccataaaacactgctttatatatactaccttttttcttttttttttttctgagacagagtcttactctgtcacccaggctggagcgcagtggcacaatctcagctcactgcaacctccgcctcccgggttcaagtgattcttgtgcctcggcctctggggtagctgggattacaggcgcacgccaccatgcctggctaacttttgtgtgtttaacagagacagggtttcaccatgttggccaggctggtcttgaactcctgacctcaggtgatcctcccatctcaggctcccaacctactgggattacaggcgtcagccaccatgccgggtgctatactacctcttttaatcctcacaacagaatcttctatactattatcaacaaccccattgagcagatcagcaaacagactcatagagataagccactcactgaaggctgcctggttaaatcactgaatcataaatcagagagaattcaaacctgggtctcttatctcaaaagtcttaatttgcctcactacacacttaagagcagaagatcgaatcagactagtgtgaaatgaaatagggtttttttgttgttttggttgtggtgtttttgtttttgttttaagattctgctctgttgcccaggctggagtacggtggtgcaatcatagctcactgcagcctccaactccctgggctcaagtgatcctaccacctcagcctcccaagtagctgggattacaggcacatgtgaccatgcctggtaaattaaaaaaaaaaaaaaaattgtagaacccggtctcattttgttgctcagggggtctcaagctcctggcttcaagctatcctcctgccccggcctcccaaagtgctgggagtacaggtgttggctactttcaaaagctttttaggccgggcacagtggctcatgcctgtgatcccagcactttgggaagccaaggtgggcgggtcatgaggtcaggagatcaagaccatcctggctatcagggtgaaaccccgtctctactaaaaatataaaattagccgggcgtggtggcgtgcacctgtaatcccaggtacctgggaggctgaggctggagaatcgcttgaacctgggggggtggaggttgcagcgtgccaagaccgtgccactgcactccagcctgggcgacacagtaagaatccatcagaaaagaaagaaaaaaaagaaaagaaagaaaagaaaagagaaagaaagaaagaaaggagaagagaagagaagaaaagaaaagaaaagaaaggaaatgcaggtgcccagaaaaaaaggcaggctcccaaagtgaatactaagacactcaatctcacatgttgtcaaaaaagctattgaaatttcaggtgacagagggacttaagaacaacggtgctcaaggaagtcaacacaggctacgacgtacaggactcccaatccggctcatgaccacatcccctattgtggtcatttagaacacgctaggcgtcctttgctctaagcgtgtttcatgtacgtctccccatcaatgaagaaagcacctggagagtaggaagtaagagttatgtactctgagattctctcttaagcccaggaatcagtctcactgggcggggagctcaacagcgctgttagtgtcgttcgctgataattactttcacactagaataccatcttcattcctcatttatacgggaaactccttgtggttccctttggggcaccagctcccagcacattctatgtcatcaaaattaactcttggccgggcgcgggggctcacgcctggaatcccagcactttgggaggctgcgggggcggggggatcacctgaggtcgggagttcgagaccagcctggccaacacagtgaaaccccgtctctactaaaaacacaaaaaattagccgggtatggtggcggtcgcctgtaatccgagctactcaggaagctgaggcaggagaatggtgtgaactcgggaggctgaggcaggagaatcacttaaacccagtaggcagaggttgcagtgagctgagattgcaccactgcactccagcctgggtgacagagtgaaactctgtctcgaaaacaaacaaaaaaactaattcttaatatattaaacaaacgtactaaacaactatgggaacagcgacggtgttgtttttttttggagacggagtctcactctgtcgcccaggctggagtgcagtggcatgatctcggctcactgcaagctccgcctcccaggttgatgccattctcctgcctcagcctcctggtagctgagactactggcgcccgccaccaagcccggctaattttttgtatttttagtacaggcggggtttcaccatgttggccaggatggtctcgatctcctgacctcgtgatccacctgcctcagcctcccaaagtgctggaattacaggcgtgagccaccgcgcccggccgcgactgtgtttttcaaacagctgcatttaccagccactactggattccttctacgtgtgaagccctgtgctaaaggctgggaacagaaagataattgatacacgagcctttctttcctttatggaaggcccagccccatacggaagacggacgcgtacataaactattaggatacaggaaaagcgcgatactactggcacatagaggaaatcggggaagatgcttagaacaatgtctggggcacacgctcagtgctttacaaaatactcgttatttttaccatctaaccttgtgagttagagcgactgaagaggaaaggccgtagcgtctgagctgctctgtgaagaatgaaccggttttcaccaggcaggccaggagtgggatagggcgaggcatccaagaaacagcaagaggcaggcagagctcagcacacgtttttccagactgtgaaccatgaagctctgaaggctgctaggagggccacgggagctgtgggagagggtgaggctggagccctgtgggctaacagacagggctctaattcgtgacatcgtggcaacaaactattagaaatgaggctagacctggaagccctgggggcacagtctggaggggagacagacgagagctaagtagaatgcaggcaatgacgccgtaacagagatctgcacagcgaccattgcacagcgtgggggcaggcttctgagaggaggtaacatgctgaaaagacaacgtgtacagctgacattagtacacaacctcatcggagagagaagaagcggagggaatcccaggagcaggggccatcatgctcaaaggttccaaggtacggcaatgggcgatgtgtctggggaccctgggggtcgaccagtgtggctgagcagagtgtgcaaaggtgaggatgctagaaggccaggtgcggtttcggggcggggcaggggttgcccttgaaggtggggtttgggggtgggggagggggtgcccttgaaggaggggtttgcgggcgggggtggggggaccttgaaggtggggtgtgggggcaggggagggggtgcccttgaaggtggggtttgggggcaggggagggggtgcccttgaagtccacgccagggagtttgggttggatccacccgtaatgagggctggcccatagggcagtgacgtgaacaactggtactgtagccaggttgttctgggagctgtgtagacagggtgagactggaagttggtggactcattaagggactagtgaaacaatagtgccccaacctgattgaacccagtgaatggggggaaatgagaatgtcaaggcctgtagcttgggtagatgcgtcagtgagaccctattcataaccagagcctaaaaaaacacgcagagccagttaaaagctctaatatgtgtttaaagaacaaattaatgaaagaatgcgtagacaggccaggtgcggtggctcacgcctgtaatcccagcactttgggaggctgaggtgggtggatcacctgaggtcaggagttcaagaccagcctgaccaacatggcgaaaccctctctctactaaaaatacaaaaactagccaggtgtggtggcaggcgcctctaatcccagctactcgggaggctgaggcaggagaatcacttgaacccgggaggcagaggttttagtgagccaagatcgcgccattgcactccagcctgggcaacaagagagaaactctgtctcaaaaaaaacaacaagtagacagagagggaaggagaaggagagaacaaagcggaagaaaaactagtgaagagcagggaaaggaatctgggttttttttgttttggtttggtttttggtttttggttttttgttttttttttttgagacagagtctcactctgtcacccagtctggagtgcagtggcacgatctcagctcactatagcctccgtctcccaggttcaagcgattctcccgcctcagcctcccaagtagctcagattacaggcgcccaccatgccaggctaatttttgaatttttagtagagacggggtctcaccaagttggccaggctggtcttgaactcctgacctcaaatgatccacccgcctcggcctcccaaagtgctgggactacaggcatgagccaccgcgcccggccacgagtctggttttaaacccgtggagctaaaggtttctggcaagcagggaaaggacacgactcattgactgagaagcaggaggcgtccaacacaaaggcctcttgggaacccgctggggtttggcgggcgtcacctttctgcatcttgggaggagagctggtgggaggagcttttctgcaggtgtctctttctagcctccggcagggggcggcaacagaagacggttcagaagaaagaatgtggccaagtatgtgtatttcaagccaaaggattctagaaacttctctcacaggtacggaatccaaccacagtgcccactgtggtgaagccactgcgctggtccgagaagaaagtgacaaacaaaatgacatggagcccaattcatcctgagagcagaacctcggagccatgtggttaagatggaaattccacttttagtccaagcaaatcttctgatgtatcaagtttgagggtgaggtttcattaaaggaatttaaaataaaaaagtgagatcacagcaaattttttaaaatgattgtttcagtgaagggaaaaaaggtctttatccttattcagggcgtaattcctgatcctggtccccggagacaacacccacccttgggcgaatcattcctggggacggaggaatgagggaggcgtctctttatttccgggggcggaggagtgagggaggcgtctctttatttccttgtatataaaatacaagaactaaataccttggattaacaaccagggctggggtttgtgataaggctgtgattaggaccacataaaaggagaaaacgtcttaataagaacttctttgtggcctgttagagcctttcttaggaaactaataagttacacttttcctggagagaaaatcttggaaatgacccatttccccaacaggacatcatttccggtcattcacatgtggtcaagttaaaaaagatcgtttgaacctagctcagccaggccagggagaaaattaaaaataagtgtttatttttctgattaaagccaaacaatgagactcaaaataggccacacaaaacccacagaatcttccaagttcgcctgagctaatgcatccaaggacgtccactcacaggggaagaagcagaggggctggccttctcctaagggggcagggctggagatctgtcaaattccttatccatatctaggagcagagcttccttttggccaaaagagtaagctgactgcgaaggacagatacttccaagcagacactaagtaatgcagttggtttgataacaggacagatgaaaatggaaggcctcctccgaaaatcccacagcctgggccagggctccaaggggctgactggttcctgtggttcaaatctctgcaaacgtctccttccctcctgccccatctacggcaggtagctgagccgtggcccaggctctgggagtgcacactctcaacaagcagatatgaacagacacgtccagaaagtagataggtggacagccagtaagaatatgcaaaggtgtcatcaaggaaatgcaaattaaaatgatttcacactgactagaatagcaaaagtaaaacacacccacagtatcaaacccgggtgaggacgtggagcaagtgcgagtctcacactccgctgccggggacataaatggtgcaaacactttgttgttgtttgagacaggatctcactgttacccaggctggagtgcagtggtgcgatctcagctcgccgcagcaccccagactcaagtgatcctccagcttcccgggtagctgggattagaaacgcgtaccaccacactcgaaaattttccattgagacggggtttcgccatgttgctcaggctagtctcaaactcccgggctcaagaaatctgcctgccttggcctcccaaagtgctgggattacaggcgtgagccgccatgcctggtcagtacaaccactttgaagaaccgtttggtccatcttatgaaggtaaatgttcatttacctgataatcgactcagaattctaccgctcaggattcctactcatcagtatttacccaagataatttttttaagtccataaaaatgtttataacagccttccccaccccaaactgacaacaactcacatacatccatcattggaagaatggatacactgtgacaagatgctcgtccaatgggacacttctcagcaataagaaggaacaaactgatgtatacaaaaacaaggataaacctcacaatcatgctgagcaaatgaagcccgacacaaaataacactgactgtacgattccatttccatgacggtctacaggcaaaactaaattacagtgacagaaaaccaaagcgacggatgggagggggagtcaccagagaggctcagcaggggactgtgcagggagatggaaatgttcttggtcttgtttggataattgttcatatcggtataacagctgttcaaacacactgagctgggtccttaagaaccatgaattttattgtgttaaattaaacctaaaaaaagaactcataccaacaagaaggagaaaaaaataatttgtcttcatctcatctagagccaggtaactgagaattccagcgtgggcacagggtgctgcctcctgagcacggccaccttcccacaagtgaccacctcccctccctccctccctgcctttccctgccatggttccctgtctccatgaatggaaccaactaccctccacccagtgtccccaaaccagaaacctggcagtccttccccatgcttctctcttcctcatttctgctcagtcacttcctagacagctcctgaatgaggcggagccctcccccgtctctgccccaactgcctcaattgcaggggtttcttttgtttgttttgttttgttttgttttgagatggagtctcgctctgtcacccaggctggagtgcagtggcgcaatctcggctcactgcaagctccgcctcccgggttcacgccattctcctgcctcagcctcccatgtaactgggacttcaggcgcccaccaccatgcccggctaattttttgtatttttagtagagacagggtttcaccgtgttagccaggatggtctcgatctcctgacctcgtgatctgcctgccttggcctcccaaagtgctgggattataggcgttagccaccgcacccggcctctttgttttgtttttgagacgttgtcttgctctgtcgcccaggctggagtgcagtggcgcgatcttggcttgctgcaacctctgtctcccgggttcaagcgattctcttgcctcagcttccctagtagctggaattacaggcgcccgccaccacgcccagctaattttagtagacacagggtttcaccatgttggccaggctggtctggaactcctgacctcaggtgatctgttcatcttggcctcctaaagcattgggattacaggcgtgagcccccgtctccactaaaagataaaaataaaacttggctgtgtgtagtggcgtgcacctcgagtcctagctacttggggaaggctacacctggccaacttcctatttttaaatggaaagaaaaaaacacacaccagggccttgtttcctatctctcctgcccattccttctctctccacaactcagacagcgacggtgtcaatcaggccagtaagggaaaggctgggggaagacgatgctgactgtctcttactgaatctgtttctgagacatggaaacaccctgttcacagaggcctctcttcctcccacccctgccccccgcccagaactcccagcagaagctgctcactggctgttgtcaaagtagtctttgttcttggagttgaaccagcacaggcctcaaatttccatccacagctccaaaccccgcctacatcacctccatgacctcaggctaaggaaagaaagaagctggccaaaaacatgccaggctaagaagccaaagctcctcccaagagagatgactctggaggggaccctctggtctcctctccatgaagccaggtcgatgctggaagggcagaaatgcccagaaagaaaagcactgaggaaggctcacagggcaaggacttcagtggtcacggtcccatcatatacagaagccacggggcaggacttcaggggtcatggtgccacattttgtacagaagtgggaggcagcaaagccgcaagatctaaagacagagttgcaggcccaggtgcggtgcttacgcctgtaatcccaatcagcgtgggaggcccaggcaggcggatgacctgaggtcaggagtttaaggccagcctgagcaacatatgcagcccccatctctactaaaagataacaataaaacattgctgggccgggcgcggtggctcacgcctgtcatcccagcactttgggaggccaagacgggcggatcacgaggtcaggagatcgagaccatcctggctaacatggtgaaaccctgtctctactaaaaaaaatacaaaaagttagccgggcgtggtggtgggcgcctgtggtcccagctacttgagaggctgaggcaggagaatggcatgaacctgggaggcggagcttgcagtgagctgagattgcaccactgcactccagcctgggggactgagcaagactctgactcaaaaaataaataaataaataaataaataataaaacgaagctgtgtgtagtggcgtgcacctagagtcctagctacttggggggctgaggtgggaggatcccttgaacccagaagtttgaggtgacagtgagctatgactgcaccactgcactccagcctgggtgacagggcgagaccctgtctctaaaaaataataatcatgtaaaaaaaacagagagattcggggaactgtggatgatgactgcagggcatggtcaaaaagaagcagagaaaactcgccaaagcgagtcagggaagtgtgtccggcactgtccaggggaaggacaacactctggacacaaagatttgatggccacaggaaaagggccgttgggctggggacaggctgggacggatcctcctcctccattctctccccatccacccgactttctagaacaccttctggaccctggtttgcttctccagccacctagcagggaagtggagtcttgaatccaaacgttcagatactagaaaagggatggacggtccctcgggaattaataagctaaacggagctgaagacggatcccaagtgtctcaacagctctggatgtcccgataaaacatgtttctagaatgtgaacagttttgaaacatctgtattccaatcaccaatccagaatcttgggagctaaagaaagtgtgggctttcccccaaaacaaacactcagcggaggacacaggagaatgaccaaggtgtaaatgaaagaagaatctggcctggggcatcctatggcgagcgccatcccctttaggggtaagagggacatctaagaccaagcggagctgagtcaggcctcctgggtgggatgatacagtatgaaagagaggtccaggaaagggtctcattcaggctgacatgtcccatcatgatcagtcaagtttaggacagagactaataagactcaacatatgcggccggtcgcagtggctcacgcctgtaatcccagcattttgggaggccgagacgggcggatcacgaggtcagaggttgagaccagcctggccaagagaccagtctggccaacatggtgacacctcgtctctactaaaaatacaaaaattagctgggcgtggtgcaggcgcccgtcatcccagctacttgggaggctgaggcaggagaatcacttgaacccgggaggtggaggttgcagtgagcggagatcgcaccactacactccagcctgggcaacaagagcgagactcaatctcaaaaaaaagaaaagaaaaggaaaaaaaaaagagttcaggatttcatagtccgtctcctatgtctagtctttcatttctcataatcgtttcttagccaggaatcatctctggaagtaaatggcttccttttctttgcgcacacatgcccctctctgaagagaggcgccatgcccacctgggggctgcggtactcgcttttttttttttttttttttttttttttgagacagagtcgctctgtcccccaggctggagtgcagtggcgcaatctcagctcactgcaagctctgcctcccgggttcacgccattctcctgtctcagcctcccgagtagctgggactacaggcgcccgccaccacgcccggctaattttttttttttgtatttttttagtagagacggggtttcaccgtgtcagccaggatggtctcgatctcctgacctcgtgatccgcccgcctcggcctcccaaagtgctgggattataggcgtgagccaccgcgcccagctgtggtactcacttttaatgctccttagaaaattctaaccaaaggctccaaacgcagctcaaaaccctggcatggaaccacacaaaaggcacaaagaggctggggccaggtggagcccatcagaaattgaaggctctgtgtcaggagccaccccattctgaccacgggtccgggtttctccacggaagcagctcccaggtccccagtgttaggcagagtggatttcagtcaggaaaactacgcaaggccatgttcttagaatctctccaacattattcttggctctgctgacattgctttggctttaaaaaatcaataaattaagcaagcagaaggttctctaacatccaagctggactaaagggttttgctcttaccgagccagagggaatatttattccaagagacgtaagatagattctgctggacacctgccacttgctcatgattcttccctgggaggctggcagcgcacggagaggcttcgctccacgggaaccaacaccgttggccggcgcggtggctcacgccaggaatcccagcactttggaaggccaatgtgggtggatcacctgaggtcaggagttcgagatcagcctggccaatgtggtgaaaccccatctctactaaaaatacaaaaaattagccgggcgtggtggcacacagctgtagtcccagctactcaggagactgaggcaggagaatcacttcaactcgggaggtggagcttgcagtgagctgagatcgtgccactgcactccaacctgggcgacagagtgagactctgtctcaaaaaaaaaaaaaaaatagaaataatacctcttactacactggatggtttgaattccaacctaaagcaaaaagaggaaggctttgatctcattctattgtttatcctaacatttttgcctgacagtctggataaaacaaacttttattttgttatttatttattttttttcagatccaggctggagtgcagtggagtgatcatggctacggccttaacctcctgggctcaagcaatcctgccacctctgcctcccaagtagctgggactacaaggcgtgaaccaccacacttggctaatttttgtatttttttttttctgtagagatgggggtctcaccatgttgcccaggctggtctcgaactcctggcctcaagcaattcacccgcctcaaccttccaaagtgctgggattacaggcgtgagccaccgcgcctggcctcagtcttttatctggtgggagctccataaatccatgctagctgaccggccagtcctctcccaggcaagtggccacagcgacgaaggtttggcggaggtgcagggggaggtgtggacaacgtacagtcacaaggcagcgtccgattcagtgagggtgactggggaagctgccgttcatgagctcttgtcaccaacttgggaagctgccgttcatatgctcgtcaccaaagtcaagaataccttcttctgcaccacattctcggagattttccaaatcccgggcattttcaggccttcactccctccactaataccccacagcttactcctcccaagtgaagaggccgagaaaagaatccattttatttgtcagaaccagccataaggtaaacaaatacaaagaaagtgtgtgctcgccaattaaacgggaatgcaggcttctggcggagacatgaccccatttttccattcgctccatgtcagtgaaccaccgtcacagagctggcccctatggcttgagggggaaaaaagagaaaggctttctacgtgtttctacatgccttttccacctcctttttcctaagaaaaaggcagaattccatttgacccaattcccattcgatggaaaagaagaacagagaggcaaggacgtgggcttcagcgtcacggaggcctgagtttaaacccttggatctatgacaacccactagccgtgaggttcaaagcaagtccaccagacctctccaagcctcagctccctcgtgtaaaacagagaggtctgtaactgccacacgggtcacggttgagaagcgtgccaggtacagcacatgctcaggagtgttcctgtctcctcaacttgggttcatacgacacggatggggcgcaggtaccgtacggggtacagagagggacagaaagcagggtttaagggacttctcatgcaataaaaaggaaaatctgtatcttacagcaggactaagttccacaagattagttttaatttataatctttacttctttgagacagggcctcgctctgttcctcaggctggagtgcaggggtgcaagcacagctcactgcaacctcgacctcctgggctcaagcgatcctcccacctcagcctcctgagtagcagggaccacaggcatgcatcaccactcctggctaatttttaaaatcattctgtagagatggggtctcgctgtgttgcccagtctggcaaagaaatcctgggcttaaaggatctggccaccttggccccccaaagtcctgggatgacaggcatgagccatcacacctggtctcagcaaggttttttgacttcaagaaaacgagggtgctcttaggtcttcagacaattgctattatcaatcatagcaaaaaataaaaaataaatacagctgggatgagagaggacattctagatgcatcagaacttacataaagattgacagaggccaggtgtggtggctcgcacctgtaatcccagcactttgggaggccagggcaggtggatcacctgaggtcaggagttcgagaccagcctgaccaacatggagaaaccccgtctctactaaaaatacaaaaattagctggacatggtggtgggcacctgtaatcccagctacccaggaggctgaggcaggagaatcacttgaacccaggaggtggaggttgctgtgagctgagatcgcaccactgcactccagcctgggggcgacaagtgcaaaacaaaactccatctcaaaaaaaaaaaaaaaaaaaagattgacggagccacttgaaacatctgactcagaagaaacaagaaccagaacgctgggggttctaagccttacagcacaaagagaaagacactaatgtttgtggttaaccgatggattgtggtcaggaaacaggttcaaatctcatctccaccacctgccagctatgtggcacttaccttctcaggaggattaagtgggaagacagagcagaaagcccagcgcctgcacgtgccacacttgccttctcaggaggattaagtgagaagacagagcagaaagcccagcacctgcacgtgccctgtgcttcagtgatgaagctaccgttgtcgaaacatactgaaaagctctaagccctgctacccgcagtgatcctgcatcggaggcaaaaagaccacaggaaggtagaaatgaatgagaaatgcagagagattggccggatgcggtggctcacgcctttcatcccagcactttgggaggccaaaacaggtggatcgcctgaggtcaggagttcaagaccagcctggccaacaaggcaaaaccctgtctccactaaaatacaaaaattagcctggtggtggcgtgtgcctgtaatcccagctaggagaatcgcttgaacccgggaggcggaggttgcagtgagccgagattgctccattgcactacagcctgagcaacagagcgagactgtgaaagaaaagaaaagaagaaagaaagaaaaagaaagaaagaaagaaagaaagaaagaaagaaagaaagaaagaaagaaagaaagaaagaaaaagaaagaaagaaaagagagagaaaagaaatgcagacagattaattgttggctgttgcagaatgcaaaatgaggaatgacactcgggtttcaagtctaaggctgtggatatttcggagcctggtgaaaagcaaagcactgccacgttttcccttcgctcccccaacctgccgtagatcacgtacccccactcacaaagagcacacgcccagtaccccatccctctcaccaggatgaagaaagacacccaaaacccaaggtccaaacttaggaagaaactgaattcaacacaacaaaagtcaacacctcatgtgtaaaggatcttaattaaacagtatcaagcatgccggcgtgaactcagtgtctggacctactcgttatgaaataaacttaagaataaatcccatctaagaacagaaaaaaaccagcaactctcatgcacatcaaatgctgttctcgatgatccttttccctctgaacatcacaaagcaccagcaggtgggagataattaaagtttgaataaaatttgttttatatgcctcagttggaacacttttgttccgcaaagctcttcccgctccagcccaaagatgcacccacaaagaaagaaatttttctttttgttttttgagacggactctcactctgtcgcccaggctggagtgcagtgacacaatctcggttcactgcaagctccacctcccgggttcacgccattctcctgcctcagcctccccagtagctaggacttacagacacccaccagcacgcccggctaattttttgtatttttttttttagtagagatggggttttcaccttgttagccaggatggtctcgatctcctgacctcgtgatccgcccacctcggccgcccaaagtgctgggattacaggcatgagccaccgcatctagccaagagttttttcaaaataatatttttctggatttttctggttacatctggggttttatgacttctgacagataagggtggaggaagtaatttacgaaaagaaacatctctcttgatccatatttacattccataagggagtgagtttggcttttggattctcctcccaggcctatcagggggatagaattcttgctcctatttgatgagatttatggggcaatgaggtctgtgaggctgatgctacaccacctgcttcacgaatacggcccctccatttgcaaagtgctgacttggaacatttgtatttttcccttacaaatcaatcaatctatctatcggtctgtctgtctgtctgtctatctatctatctatccgtctgtccacccatccgtctgtccgtccatccgtccgtccatccgtccatctcactctgttgcccaggctgtcacacagtggcacgatcacagctcactgcagccttgacatcctgagctcaggcgatcctcctcagcctcccgaatggctgggaccacagctgtgtgccaccatgcccagctaattttttgtagaaatgaggtctcatcatattgctgaggctggtctcgaattcctgagctcaagcgatcctcccaccttggcctcccaaagtgctaggattacaggcagtgagccactgcacccggcctaaatctctcatgtttataagaggtcatctgatggctttccatcccattcaaacacatttagcatccatatctgcctttaataaaaggtcataatacagccctggcatcacaaaagctaaccagagaacactgaggatatcagctcatgaagatactctgtctacaatgagactaggacaactgtcttccttttcagaaaaggaaactgaggcagtgagaggctatgatgcttcaacacgggggacctcaacccaagacttgtgcttttagttccatcacagatacatcagagactgtacttagttggggagtaacctaagctaacctcaccatgcacagcccaacagggaacctaagctaaccccaccatgcacagcccatcagggaacctaagctaaccccaccatgcagaacccaacagggaacctaaactaaccccaccatgcacaacccaacaaggaactaaggtaaccccaccatgtacagcccaacagggaacctaaactaaccccaccatgtacaacccaacagggaacctaaactaaccccaccatgcacaacccaacagggaacctaaactaaccccaccatgcacaacccaacaaggaactaagctaaccccaccatgcacaacgcaacagggaacctaaactaaccccaccatgcacaacccaacagggaacctaaactaaccccaccatgcacaacccaacagggaacctaaactaaccccaccatgcacaacccaacagggaacctaagctaaccccaccatgcacaacccaacagggaactaagctaaccccaccatgtacagcccaacagggaactaagctaaccccaccatgcacagcccaacagggaacctaagctaaccccaccatgcacaacccaacagggaactaagctaaccccaccatgcacagcccaacaattagaacttagggcattttaattggactcagacctcatgttctgaatttaagacggtgacagttacaggaatgtgtgtagggattatggctggaatgctgcctctcacttacagctgaccctcttcccaggactctccaaatccacctggtgcctctcttctgcccccgcacagccaggccacccctcatccaaacaccaggtttccagcactggagcctcacaagctcatccccacccacaaaacactcacaaacgcacctggcaagtcagtgtctgcatagcaggtctcgcagtctcagcactgctgacactttgctgggaaggggcggggcggggtggggtgtgtgggggggtgctgttccgcacattgtagaatgttcatcgctgtcccaggaaatgccagtaatgcccgcttagtgacaatcgaaaatggttccagaagcccaggagactttgagaccagtgaaacaattctgtatgatcccaacctggtggatgcatgtcattcattatgcattcgtcagaaccaacagtgtccaacacaaacaataaaccctaaggtaagctgtgaacttcagatagtaacaatgtacccataccagcccctcagttgtaacaaatgtagcgcaccaatgcaagatggtaatgacagcaggaatacctggagggcaagggaggggtacctgtgaactctgtactttctgctcagtttttctgaaaacctaaaactgttctatgaaacaaagtctatcaattaaaaatttaaagtcttcagacgtttgcctatgtccctaaagggcaaagctgttccacttggcagatgcggatgggagaacacgcctacgcaggccaagtctccagcagggcaatgctctcgttacttccacgagtcaatcagtgcagttgtatcaggccacgttcctggacagagactggaaaaggtgagctttctgagtgcgcatgggttgtggacactcctctgggggataatctttttaggggagaaagcatggagcccagtctcaggaaaccctaggcagaggctggagacagaggcctaatcctccggtcccagcttaaaagacagcaccttggttgctatattcactctggtgagaatgccctccttggatttccctttttcaaaaattatctccatcgctcagtagcgtgacataagaaatggaaagaagccttggccttcaaaaaaggccagaggaagcatctcaacgcctggaagccagaggaagcatctcaacctccggaagccagaggaagcatctcaactccctggaagccagaggaagcatctcaatgccctggaagccagaggaagcatctcaacccctggaagccagaggaagcatctcaactccctggaagccagaggaagcatctcaatgccctggaagccagaggaagcatctcaacccctggaagccagaggaagcatctcaactccctggaagccagaggaagcatctcaactccctggaagccagaggaagcatctcaactccctggaagccagaggaagcatctcaactccctggaagccagaggaagcatctcaacccccggaagccagaggaagcatctcaactccctggaagccagaggaagcaactcaactccctggaagccagaggaagcatctcaacccccggaagccagaggaagcatctcaactccctggaagccagaggaagcatctcaactccctggaagccagaggaagcatctcaactccctggaagccagaggaagcatctcaactccctggaagccagaggaagcatctcaactccctggaagccagaggaagcatctcaaacgccctggaagccagaggaagcatctcaaacgccctggaagccagaggaagcatctcaaacgccctggaagccagaggaagcatctcaaacgccctggaagccagaggaagcatctcaaacgccctggaagccagaggaagcatctcaaacgccctggaagccagaggaagcatctcaaacgccctggaagccagaggaagcatctcaaacgccctggaagccagaggaagcatctcaaacgccctggaagccagaggaagcatctcaaacgccctggaagccagaggaagcatctcaaacgccctggaagccagaggaagcatctcaaacgccctggaagccagaggaagcatctcaaacgccctggaagccagaggaagcatctcaaacgccctggaagccagaggaagcatctcaaacgccctggaagccagaggaagcatctcaaacgccctggaagccagaggaagcatctcaaacgccctggaagccagaggaagcatctcagcaccctggaagccagaggaagcatctcaatgcccagaacctgggggtcctgccgggggcagcctctgcagctctgccactggtgtccgcagggacgggcggagacatgacggaggcgccccaagaagacggtccccagttttgctaaactggctgctaaaatacccccttccatctgaaaacataattgagatgtgactgcctcaactttaaatccacttggcttcaggcatttgcatggctgaaacgtgggcacacccaggtccccgctggccgccttcatgattccctgaaatcctggctctccctgattgcctttctctctcatcctttcctttcaccctttccttttttttttttttttttttttttttttttttttttttttgagactaaatctcactccgtcgcccaggctggagtgcagtggcaccatctcggctcactgcaacctccgcctcctgggttcaagtgattctcctgcctcagcctcccgagtagctgggattacaggcacccaccaccacgcccagctaatttttgtatttttagtagagacggggcttcaccatgttggccaggctagtcttgaactcctgacctcaggtgatctgcctgccccagcctcccaaagtgctgggatgacaggcatgagccaccgcgcctggcccaccccttcccttcatagttcatcttctctaatggagagaggaagaaaagagggtacccaaagaagcaaaaaaatgagagaaaatgagagatgatcaaacataaaccaccatggggactgctgccatgacacagctgggtatggggagaaacagaattcagcaaccttctaaagctgctacaataatactttctggtttaaaaagacccaatgtggccgggcgcagtggctcacgcctctaatcccagcactttgggaggtcgaggtgggcggatcacagggtcaggagatcaagaccatcctggctaacacggtgaaaccccgtctctacttaaaatacaaaaaaaaaaaattagccaggcgtggtggtgggcacctgtagtcccagctactcgggaggctgaggcaggggaatggcgtgaacctgagaggcggagcttgcagtgagccgagatcgcaccactgcactccagcctgggttttgtttgtctcaaaaacaaacaaacaaacaaaaaaactaatttttcccaacatcattaattcttctcaacaatgtagtatcttccaaggtgaatcttttagtaaaatgggctttacaaactgttgatgggctgggggcagtggctcacacctgtaatcccaatgctttgggaggctgaggtggggaggattgtttgaggccaagagttcaagaccagcctgggcaacagagcaagactatctctacaaaaaaattaaataggctgggcatggtggcttatgcctgtaatcccagtactttgggaggctgaggcaggcggatcacctgaggtcgggagttcgagaccagcctgacaacatggagaaaccctgtccctactaaaaatacaaaaaattagccgggcgtggtggcgcatgcctgtaatcccagctactcgggaggctgaggcaggagaatcacttgaacccaggaggcagaggttgcagtgagccgagatcgagccattgcactccagcctgggcaacaaaagcaaaactccatctcaaaaaaaaaaaaaaaattaagtaagcaaggcatggtggcgtgtgcctgcagtcctaactactcgggaggctgaggtggattatttgagcacaggagtttgagattacagtgagctgtgatcgtgccacggcactccagcctgggcaacacagcagaccctgtgtctaaaacacaagaataaaaaacaaggaagtagaactattcccgtacctctccctgttgcctcgcacaccgtataaacttaccagacgttaactatcgtcttcgtgtttcaacttcgctttaaagtaaaatataaacatttattaaactatccagttctcccacttctcatcttagtcaccccggcccaaggaagtttttgtggaattgacagatgacatctgtttttacagagagttgtttctggtaatagaaccttctcctcgacttcaaagcttccctaaattctctacaatagacacttgaacctctgcagatctcgaagatgctaaaatggaccacgcggtcctgaccacccgcccccggcccctcaacaaactcacgctatttctcagttcctgcatatcacacacaatattcttctttttttcccaagccagtcccctcctaggcctgttgcagtgacgcctctcctaggaaagtccccgcggcagatacacggactccgtaatggaaactccggcgtgcctaacaacagcgtcactgtcacacacgcgtgagctttgacagccagggactggtaacccacggccaccgcgcccaagaaaattatttcccatgggagaaagaaaactacgttcagctcctggcaggtcccaggcaagtccgagccaggcttgcagggaggcgaatgctctgtcctgggaaagggaggcagaggttaagggctgttcccaccctccagtgacccagatgggaaaggcagctgcgtggacatcaaaatgacagcagagacgtgtggcttttccccagcgtcactgaaacaaagccagcatgggctgccccacactgtttacaggacaatcaattagcaagatggatctcatgattaagagaaactcaatttcttcttgaaagcacgttctagggtggggtgcatccttaccacatcagtcagatgtcaaaaggcagcacgtaaattgaataagggaaggaaaatgccgggcggcctcattcacgtccggcatgttccgctattattgaaaggaaattgagaaattagacagtactgcctattagcttcacaatgccccgtcctagggcaatccgcaaagatttcctcagtgtgctgtcaactctgtgttaaatgaattctcggtccagcatttgtttttcttttattcttttttcgagatggagtctcactctgtcacccaggctggagtgcagtggcacgatctcggctcactgcaacctcggcctccaaggttcaagcagttctcctgcctcagcctcccgagtagctgggactacaggtgcccgccaccacgcatggctactttttctatttttttcttagtagagatggggtttcaccgtgttggccaggctggtctcgaactcctcacctcaggtgatccgcccacctcggcctcccgaagtgctgggatgacaggtgtgaacccctgctgctggccagttaagattattttaaggataacttgatattgtgcacttcaaagttctccatggattgagctggtcaagcaatgcttaattttcaagtaactacccacctactgctgtgcctttcttccccacagccattcatctttgttcctgtcttcatggggctcagggtttctcaacctcagcacttggcggctggatggtttctccctggtcgaggctggtctgtgcattccaggatgtccagcagcactcctggtctttaccatccccccaagactggacaaacaaccctgggggaaaaactgccccagttgagaaccactttcctagttccatgcactctgctctcctgggacacacccctcttcagctcccctgcctggaacacctttgatcccatctttacctactaattcccactctgccatctggagctcgtccggacgccacctcctctgagaaactactctgaggccaggtgtaatgtctcacccctgtaatcccagcaccctgcctggaacagctttgatcttctttacctactaactcttactctgccgtcaggaactcgtccggacgccatctcctctgagaaactactctgaggccaggcgcaatgtctcacacctgtaatcccagcactttgggaggctaaggtgggaggaccacttcaggccaggagttcaagaccaggctgggtaagatggagaaatttcatctttacaaaaaatacaaaaattagccaggacggtagtgcacacctatagttccaagctgaggtgggaggactgcttgaaactgggaggtcgaggctgcagtgagccatgagggcaccactgcactccagcctgggtgacaaaacagactgtctcaaaaaaacaaaaacaaaacaaaaaaactactctgaaagtcatttcttcctatcccctccctgcaaagaaggaaggacagggctgggattctgcctctgtgcatgctttttttttttttctttttttttgagacagagccttgctctgtcgcccaggctggagtgcagtggcacgatcttggctcactgcaacctctgcctcccgggttcaagtgattctcctgcctcagcctcccgagtagctgggattacaggcacccaccaccatgcacagctaatttttgtatttttagtagagacgcggtttcaccatgttggtcaggctcgtcttgaactcctgacctcaggtgatccacccgcctcggcctcccaaagtgctgggattacaggcgtgagccaccgcaccccggcctgtgcatgcttttcttacagcaccttttatattaatagtactataactgtctccttactttgcttaatactccatctatccatccattaattcaacaaatattgacgtgctgggtacaaaaaataagaccctgagagagacacctggatgcccgctctcctgagctcatattctcgtgagggaggacgatcaataaacaacaataaacaagaaaatggcaggtattactgagagctgcaaagaagatacagcttgcttctctttcccgcaaggagatttagctccttgagggcaaagactgattcactcatgattatatcgtcaggaattagcgctgagccttaaaaaacaaaaccacggattccgcactttcctcctttctctcctctctgttacggagatttaggtacagggtttcttttcctgggagacagtaaaaaaagcttcctgcagggagggtcttgcccagttgataaattttacaagctgggggcggtggtgcacgcctgtagtcccagctactagggaggatgaggcaggaggatagcctgagcccaggagttcgaggctgcagtgagctatgatcatgtcgttgcaccccagcctgagtgacagagtgagaccctgtctctaaattaattattttcacaaaggaaatcaaagggcttttgttaaagtaaatgatatcctcaagctatagagtttaacactaaaacttttctgagggccgggcgtggtggctcatgcccgtaatcccagcacgttgggaggccgaggcaggcggatctcctgaggtcaggagtttgagaccaacctgaccaacatggagaaaccctgtctctactaaaaatacaaaattagcggggtgtggtggcgcatgcctgaaatcccagctacttaggaggctgaggcaggagaatcgcttgaacccgggggggcagaggttgtggtgagccaagattgcgccattgcactccagcctgggcaacaagaccgaaactccgtctcaaaacaaaaaaaggaaaaaaaaacacaaactttctgaagatatagccaaaaagctcatgaagagagacagcattttatagatggagaaatggaggcctggaaatggtgagctgcccaaggccacaatgccaggaacccagagctgaccatctggcttcagagcccactctcttccccaccagattcccacctcttgcaggaacagagaggcacgaggaaggtacaaacatcaggaggaaatctctttcctcccaggaggctgctggcaaaccatggcatcaggatcctcccagggtgggaagggagggtggtgagtttatttacaagcaaaatgaatctgcccgttcaaggagaagaaacatgaatgatactagtttttcaaattcttaccactgggactggccctaaactttagcactttattagaaagccaaaaaccactcaaaagctaacgtctacagagaagacggccaaaaaaaaagtacctttttttctcttcatggaaagttttctaatatttaaaagctcaggattattctgcagagacgttataaatgacccaatctgcagggctggaagcatcttctgggaggcaggggagttttgagagaaaagtgtggactttatgaaaagatagatctgcattcttttttttttttttttttttttttggatggagtttaagctctttttgcccagcctagagtgcaatggcacgatcttggttcattgcaacctccacctcccgggttcaagtgattctcgtgcctcagcctcccgagtagctgggattgcaggcatccaccaccacgcctggctaatttttgtatttttagtagagatggggtttcaccatgttggccaggatggtctcgatctcctgacctcacttgatctgcccgcctcggcctcccaaagtgatgggattacaggcatgagccacggcgtccggccagatagatctgcattctcatttgtatccaaaacccctctgagcctcaacgtcaccctctgcaacatgcagggatctgtggggggagatgatctctacatgaaatggaataacagtatctggcacaaaggcagacacttaatcaacgctagctcctttcctctccgcagtttattccggggaagaactctggcctgggaaacagcagacctggtccaactcccggctctgccagatcccaagtgactcaaatgcttcagctgccctgacctctgcttcctcgttactaaaatgaaaagcacgggatctacctccaacaacagtcatgggattcaaggacaccaggacacctcccccgtgaaaaccagggcaatgaattcaaacaaagcacattaactaaatctaaatctaaatcgatggcattttgtcccataaacactcagcctgaaagtctctccttcagcttgctgtttgtttttttgttttgttctgttttttggagatgggatatcgctctgtcgcccaagccgcagtgcagtggcgcaatctcagctcactgcaacctctgcctactgggtttaagtcattctcctgcctcagcctcctgagtagttgggattacaggcacccaccatcatgcccagctaatttttgtattttcagtagagacggggtttcgccatgatggccaggctggtctcaaactcctgacctcaggtgatccacctgcctcagcctcccaaagtgctgggattgcaggtgtgagccaccgcacccggcctcagcttgctgtttaaacatggtctcatgcagagccatctgcctgtgagctggacagccacacggtccagggttccagccctccaggctcatctcccaaaaataccctcgggtgtttgtcccagctagtgagtcaggactgaacctgataccagggaacagtgttgctgctgtcagggcatctctcgccagtttcattattcactgctcccactcgcacgacggacccacgtccgccgtccgttccagacataagccaacgctcgctctggcgttctcagaaaccgttccggtaacagaaaaagctttttaacttcccgtgagatccacgaggatccgtgaggttgatacttcaagtcgaaggcacgagaatgtccttctgaacctgaaaatcacggtgaaggtcctcgggacatctacatcgaggcagaaacagatttactagggagaaggcagtggagagaaaaaggcgacacaagaaaagatgctgcctcactgggccgtcctgccctgtcccctcccccaaaaggtgagcagagaaagctttttaaaggcaactgtcactcagtggcaatgccactggctttctaggacttactttcttccctccaaacctgtttacgaaggagacgtgaggaaaaaaggtaagagtcacacagaacaagcaccacgacagcccctcccatcatcagcccctcccatcatcagcccctcccatcattccatccaccaccctggtactcacactattttaacacaacacaatggcctctgcccatcattctttttttttttttttaagactgactttcgctcatcacccaggctggagtgcaatggcgcgatctcagctcactataacctccgcctcccgggttcaagcgattctcctgcctcagcttcccaggtagctgggatgcaccatcacgtctggctaattttttatatttttagtagagatgggctttctccatgttggtcaggttggtctcgaactcccgaactcaggtgatccgcccacctcggcctcccaaagagctggaattacaggctgagccaccgcacccagcctcccctcccatcatttcatcgaccaccctggtacccacaatattgaacacaatgtataactataataacaacaataataaaagcagctaacagttatgacgtgctcacctcttcaattctgctacaagtttttttgtttttttgtttttgttttgagacagagtctcactcggtcacccaggctggagtgcagtggtgccatcttggctcactgcaacctcctcttccagtgttcaaacgattctcctgcctcagcctcccaagtagctgggattacaggcgcccgccaccatgcccagtctctgttttttgatctatgcttttttttttgagacagggtctcgctctgtcacccaggctggagtgcagtggtatgatcacagctcactgcaacctctgcctcccaggctcaagcagattctcccacctccacctcctgagtagctgggactacaggcgtgcgctaccacacccagctaactttaaaattttttgtaaagacggtgttttgccttgttgcacaggctggtctcaaactcctgggctcaagtgatcctcctgcctcagcctcccaaagtgctgggattccaggcgtgagccaggacacccagcctctgctacaagttctatacatatgggctcacttagtacccacgacaaccctttgaggtattattatccccattttccagatagaacactgaggttcagagaggctaaggagctgccggaagtcatacaacgtattatgaccgcagccaaagggcctgacgcctgccttcattcagggtagaccaaatccccactggggcggccccctccgaagccaacctcaccccccacgggcagattcctaacaaaattcacgctcccttgtttgtggtaaaagtcactagtctgtggacaaggaggagttaaggctgcatttgtagacgcagaacctagttttctgagttttgtgggctgaagtcagacttgtagcattaactttaacgtaaatttttttggaggtgattcatgtagaattcctgccaagaattttcataattagactgaataaggccaaactctgtccgtacatgcctcaccgcgtcgactgccctaagagttcttctgcagccccagcaaagcctggggaagggctggccgagcggacttccaaaactcccaggttgtaagcgggccttgctgcggagagcgggacctgcgggctgcccggacgtcggacgccgtccggcttccatccgacagactggccccagttttatggtgccccgtggccacgaaggacaaaaggaaaggacgcacacgtcggaaaaagcttataaaacaagagcctttcccagtggcctcttttccgagggctgtaaagtctctctctctgatgtggtgattttcagcatttttcccctccactttgacccaacacattcccatcagtaacaggaactcacccacatggcagtattttttcgtttacttgtttgtttttgagacacagcctcactctgtcacccgggctggggtgcaatggtgccatctcggctcactgcaacctctgcctcccgggttcaagcgattctcctgcctcagtctcctgagtagctgggattacaggcgcatgcaatcacatccagctaatttttgtatttttagtggagatggggtttcaccatcttggccaggctggtctcgatctcctgacctcaggtgatctgcccacctcggcctcccaaagtgctgggatgacaggcgtgagccaccatgcccggcccttggcagtattttttacaggtaagggaagaatacacatctttactcctcacccttagagaagcagagtctgtatgacatgaagggtttggcaaagccccctgcaaggtctgtttcccgtcttctgctcctcttcacacacaagcgtgtgtgccacattcacactcctacacccacaactacggatctaacacacagtccccaaacatacactctgccaatgaatcaagacttacctggaaggctatgtcattaaaatcactggaattatattaaaattctaaaataggccaggtgtggtggctcatacctgtaatcccagtattttagaatgccgaagcaggcagactgcttgagcccaagagttcgagaccagctgggcgacacagcaagaccctgtctgtaaatgtaaatatatatatatatatatagatgccgggcatggtaatgcacacacatagtttcagctattcaggaggtgggaaaatccctggagcccaggagctaagaggctgcagtgagctaagaatgcaccaccacactccagtccaggtgacagaacgagatcctgtcggttaaaaataaaaaaagtgaaataaagaatgtataagtttcttaaagcagtcttcaaaacagaaagggaagtttaaagcaacctgctgccccaaaatggaggggtgctcttacaggctagaacgtagtaaaatatgagacatgttaccgatacaagacagaaatcatgctattgcaaaccacagaaaatagttctaggccagtgccgttcaatagaaatataatgtaagccacatgtatcatcttaaatttcttaacagtgaaaggtaaaaagggttgggcatggcatggtggctcacacttgtaatcccagcactttgacaggctgaggcgggaggactgcttgagcccaggagtttgagatcagcctgggcaacaaagcgagaccctatctctacaaaaaatttaaaaattagctgggcatggtggcatgtgcctgtggtcccagctactcaggaggttggggtgggaggatcgcttgagcccaggaggcagaggtcgcagtgagccacaatcgtgccattgtactccagcctgaactacagagtgagaccttgtctcaaaaaaaaaaaaaagaaaaaggtaaaaaggtacaggtgaagttaatcttaatatattttaacccaatacatctgaaacatgatcatgttgaaatgtaatcaatataaacgaatagtaataggacatattacattcctttcatcgtatctgggtctcaggggcctggtgcactttataccttcagtgcatctcgatgtagacttgcctcattctcaggtacctgcttcgcagccatgagaagctagtggcggcccctggaccacacagctctgggaagtggcaccatatagttaagaagtgtccagggttctacttacttctaaactgtgtatttttgaatgactggcctggaattaataaataaataaataccatgttttttaaagtttttttttaaagaaaaatgtctgtagttcccacctgcccgtttcctacttaaacagctctggtcaagtcacttaaccttcttgagcttgagggtcataaaactcaaatgaaggtgaaaaaatgccaacacaacttcctcacaaggctgtctcgaggctcatgtattataatgcagaaggaagtgttttggggtttttttggtttctgggttttttttttttttgagacagtctcactctgtcacccaggctggagtgcagcactgcaatctcggctccctgcaacctccacctcccgggttcaagtgattctcctgcctcagcctcccgagtagctgggactacaggcacccaccaccacacccggacaacttttttttttttttagtggaaatcgggtttcattatgttggccagtctggtctcgaactcctgacctcaggtgatccgcccacctcagcctcccaaagtcaggctgggattacaggcgtgagccaccgtgcccggctgggaagtgttctgtatagtcctatgcaaatgccagttattgctattccagttactttaagagactagatcatcctcaaacagcagcagcatcttttctttggtctataaacattttgcacacacctgtccttccttcccagaggcacaaaaacagcgagaaacacacatcaacagtcccctagtacagttaccatgtcagaagctgtaaacccactttacaagaaaaatctcagcccaatttccaagtaatctttttttgggggggcgggggagggttatctccaagagaattaattagactcgtaaacaaagatggagaaaaacatccctccttgcccgacccaacctatcttgttccctttcctgcagcctctggctcttcagaagggttagcgaattacctgtgaatttaggtgattgcttcttgcaatattttaggattgtgaggagaagtgatgtctcaatacctattttttttttttttttaaacagagtctcactcggtcactcaagctggagtgcactggagtgatctcagctcactgcaagctccgcctcccgagttcaagtgattctcctgcctcagcctccctagtagctgggattacaggtgcccgccaccacgccaggctaatttttgtatttttagtagagatggggtttcaccatgttggccaggctggtcttgaactcctgacctcaggtgatcctcccgccttggcctcccaaagtcctgacattataggcgtgaaaacactgtgcctggtctgaaatacagtaatgtttggtgggcccggcctggaatatggtaatgtttagcaggtgatttacccacagattggtccttttttcagatgtcggatctgtaggattctcaagttgacacaggcatgtcttcagacactgcaactttcataaatggccacaaaatataatggatggcagaaaacaagggaggtgggttctgtcctctcgaaaccagttgcatctatctttgttggcttcatgcttgaactgccaaagtggacattcggtggcccaggctcgctgccaactcatgtaatgggctcagcagcgctccgtccctgaacctgggaggtctcagttcaacctcccagagtacccccaagtctccctctctagagacacctgtggtctgttcaaaggcattcctgctttaggacctaaaggttccaagaaaaaaagggtcccaacattctgaaacagaacataatcataataagttttcctttcttaactgagtgttccccagagacggctcacagtaggggtgagctataaaggaagaacaatttcctcaattctgacccctgatttttctcctctggtctctaattgggttacttcaaaaacccatgttctagccgggcacggtcgttcacgcctgtattcccagcactttgggaggctgaggcaggcggatcatgaggtcaagagtttgagaccagcctggccaacatggtgaaaccccatctctactaaaaatacagaaattagccaggcatgttggtgggagcctgtaatcccagctacttgggaggctgaggcaagagaatcccttgaacctgggaggtggatgttgcagtgaactgagattgtgccgttgcactccagcctgggcaacagaacgagactctgtctcaaaggaaacaaaacaaaacaaaaaacccatgttctacttttttggaccgaagccattatggttaaaccaaatagtccacggcagtggatcccaaacatgtaccaaaggccccctggagagcgcttcagggttatcacaaagctccttccatcccatgagcaccaacaactgtcttcagaccaaaaattcaagactacaggtgccattaggtgtaggatccatgaaacctttgcctcatgttttaaacactgaaaaccacgactagcacttttaataatacactcccggctgggtgcggtggctcacacctgtaatcccagcactttgggaggccgaggcaggcagatcacgaggtcaggagtttgagaccagcctggccaacatggtgaaacccccgtctctactaaaactacaaaacaaattagccgggtgtggtggcacttgtctgtagcctcagctactcgggggcaggagaagtgcttgaacctgggaggcagaggtcgcagtgagtcgagatcacaccactgcactccagcctgggcgacagagtgagacttcgtctcaaaaaaaaaaaaaaaaaaaaaaaaaaaaacactccctgccagcagtctgtcctagtcaaacgagaggaacacatctcaaaatcttcttttaagtgacagaataatgaagattaaacaagaaacatcttgggttttgtttttcacttttaatctcataaaacattgcaaaatctgaaattacaaacacttataaagctaaacattacacaaccagtgctcggcatgaaacagagagattttatatttattcttctgtggtaccaaatagaggaatagcgttcccttagaataaagtccagtgtaacatttggacagacctgcactgttgagaaaaaacaatcaagccaccgaaaacctgttctgacatgagaatgttcacaaaagacagcacttctcgacttctgctgataaacttgtgttccaaaggaaatgaattttttttttttttttttttttttgagactgagtcttgctctgtcccccaggctggagtgcaggggtgcgatctccgctcactgcaacctctgcctcccgggttcacgccattctcctgcctcagcctcccgagtagctggggttacaggcgtgagccaccacgcccggcctaattttttttatttttagtagagacggctttcaccatgttagccaggagggtctggatctcctgacctcgtgatccacccacctcggcctcccacagtgctgggatgatgggcctgagccaccgcgcccggccggaaatgagtcttaagcaactgctggtagtgatgcctctgaagtggactaacggaaaacagcgcgtgacagaggacaacgtcttaaaaaacgctggtgagtgatatcgcctttaatatctatatctatccactatggatcttatgaaagaatcatgaaatacttctaacataaaggcagtttatttgccaagagaacaatcttaaatctcctaaaagctccatccagttctaggttgaagcaacatcctacacctcctaaatcaaacaacctatgactcaaattctaatcttggccaggcctggcagctcacgcctgtaatcccagcagttggggaggccgaggcaggcggatcacctgagaccaggagacggagaccagcctggccaacagggcgagaccctgtctctactaaaaatacaaaaatgagccaggcgtggtggcgggcacttgtaatcccagctactcagaaggctgagggaggagaatcacttgaacccgggaggcggaggttgtggtgagccgagatcgcgccgctgcactccagcctgggtgacagagtgagactccattaaaaaaaaaaaaaaaagttctaatctttgtaagtggcatagacagacaaagtgttttccaaatgctgtaggatatatattttttaaagctctcaatgcataatattgtctggagggtttttatttgttttttagaagaatttatcatccgttccaagttagagttcacttgctacaaatgctcagaactgatgatgtttttttaaaaaagcaacatactttctacgtacagcattattgctccaatgaattaatgccaacaaatgtgctcggtattgcttccagattcttcaagtaactgtactccttggaatggtcaacccagtcccatctgtccttgattacttaatttgcagtcaccggggagttcaaaatgacttttccacagtgaagatggaagcacacctgggcagcagaacgagtgatgtgggctcagctcacagaccttctcacacagggatgtaacaggcggcagaaagaaggaattccctccccgcgagaaggcttgggaaggacagtctccatgttccgggagactctggactttaaggaagattccttcctgctctagcttatcttttttagcttttttttaaagtattttttttgctgattaactccactctgccaatagtgtgtcctctcaaaggactccaagttcccacagtgcatatgtatccaattttattgctttgcacttgatatacggctttgtaactgctcaaggcatatttttgtgaacattatgtttctgtctcccatactctaccctaagcttcttaacaataaaaatcatgccctgcccctgcttgggatttttaactatgactgcattaaatctataaattaattttaaagaaatgacatctttacaatattttgtatttctagccaggaacagtctgtttctccattaatgcaagtcttctttttttttttttttttttttgagacggagtctcgctctgtcgcccaggctggagtgcagtggcgcgatctcggcttgctgcaagctccgcctcccaggttcatgccattctcctgcctcagcttcctgagtagctgggactacagacgcccggctaattttttttgtattttttgtagagatggtgttttaccgtgttagccaggatggtctcgatctcctgaccttgtgatccacccgtctcagcctcccaaagtattgggattacagccgcccaccaccacacccggctaatttttgtatttttagtagagatgaggtttctttcaccctgttagccaggatggtcttgatctcctgacctcgtgatctgcccgcctcagcctcccaaagtgctgggattacaggtgtgagccacagggcccggccaatttttttttttttttaatgtctaaccaaagtttcatagttttctccaactataaaaacaaaatatgcacataaaacatttcacgtgagtctttctccctccccagatcccagtctggccctcaggtaatcccctcagttaagtaacttccagacgatattcatgcatatactttttttttttttttgagatggacagtctcactctgttgcccaggctggagtacagtggcgcgatctcggctcactgcaacctctgcctcccgagttcaagtgattctcctgcctcagcctcccaagtagcagggattacaggcgcccgctaccacgcacggctaatttttctatttttagtggagatggggttttgccatgttggccaggctggtgttgaactcctaacatcaagtgatccaccctcctcagcctcccaaagtgctgggcttataagcgtgagccaccacacccggccaaatactctattttttaatccacattcggttgaaaaaaatctgtgtataaatggaacggtgtagttcaaaccaacgttgtttgagggtcaaccgtatttgtaagatctgttgagaaattcccagaaattggactgacaggtcaaacggtccacacatttttaactgtgttaaaacactgccaaagacaccgcatcagattacgctcccccaaccacgcgggagagaccccgtctacatccttgccaacactgtatgttatcaaatgttccttttgccagtttaataatcacatatttcaaaagttgtacttctttaattgcaaacagaaccaggcatcttttcatgtttatgtgtctttctctgttcaaattctttacccaaattgattttaaaagctctttatgcattaagaaaaaaaacaggccagtgggcagtggctcacacctgtaatcccagcatgaagattacatttgggaggccgatgcgggcggatcacctgaggtcaggagttcgagaccagcctggccaacatggtgaaaccccgtctctactaaaaatacgaaaaattagccgggcgtggtggtacgtgtctgtaatcccagctactcgggaggctgaggcaggagaatcgcttgaacccgggagatggagcttgcagtgagccaagattgcaccaccgcactccagcctgggcgacagagtgaaacaaggaaaggagaaaagagaaaggaaaggacggaaaaaagaaagaaagaaaagaaaaatagcacttttctctgtcatatacgttggaaatatcttttctcaccctagggtttatcatttgatctggtttctggtattttggaccatatagaagttttatattacagtcatctcttttatagtcaccaataaaatctagattaattctctgaacataaatagaggctaacttcttattaggagaagtaaaattgaacagaaaattcatgagtcaccaaaaatccttcccgattttgtaaaatctggaaaagccaacagttgatcaccaaaccactgccagctcccaaatgacagaactcatccacagagcacccccacagcccaggatggcccattttctcctggagtctgaaaagtccattcgcttgtcagttttccagagtctgggaaccctttttgcctctagcgctggcttagctgtttcaacacagaagtgatcacagatgaagatgtcggcccctgcccacagcagagactcctcaacacgacagacagagagcaacaggctgagaaaggagagtcggtcagtttcccagagacatcgtggcacaacagagaccaaaggaaaagaggataaggaggcaggttctccacctacccccacgtccccaggcaatgcagagaccgggaaccgataaagaggcaggttctccacctacccccacgtccccaggcaatgcagagaccgggacccttctcagatgacttttctctcctggcacctgctctttcttatccttgtagtaaaagagcagacaaaaatgaagcagaaaaaaaatgtgtaaacaattgccctttccatctacactggcataaactcacttacttaagtgcaaggacattcattataacggcgtgtcctcccaaactcgcggaagatttttattttattatttatttttatttttatttttgagacagagtctcgccctgtcgcccagactggagtgcagtggcacaatcttggcctactgcaacctccggctcctgagttcaagtgattctccagcctcagcctcccgggtagctgggactccagacacccaccaccacacccagctaatttttgtatttttaatagagacagggtttcgccacattggccaggctgctctcgaactcccaacctcaagtgactcacctacctcagcctcccaaagtgctgggattacaggcgcccgccaccacgcccagctaatttttgtatttttaatagagatggggtttcgccacgttggccaggctggtctcgcactcctgacctcaggtgactcgcctacctcagcctcccaaagtgctgggattacaggcacccgccaccacgcccagctaatttttgtatttttagtagaaatagggttttaccgtgttggccaggctggtctcaaactcctgacctcaggtgatccacccgccacagcctcccaaagtgctggtattacaggcacaagctaccacgcccggccagaaggaagattctttttaaggcgagaagtatgcaatgagacagtagaggcaaggtcaaaggcaaacaccgaggtctgtaattggtagcgcaagcaaggttcctagaggagacaggaatatacacaattcaacaaacatgtatgaaatgctaccttgtgctgagcatcgaaccaggcggagacaaagatgaggagcagagactcgcttctgaccttcaaagagtccacagtccattgagtgaggtcattaactcagcaagcgagttaacagggagcgtaccgtgatgtgggaagcaagactgttgggtgtagaggaggcggagctggatgtggggaaccagggcttcccctggaggagctgatgagtgcgtggaaccaacagcacaggcaaataaagcaagcaagtgagatgagttttcctaaaatattaaagggggtgaaatcgcagacacttgtactggaaaaatttcagagttgatttttttttttagacaaagtctcgctcgccaggctggagtgcagtggtgcgatctcggctcactccaacttctgcctcccaggttcaagagattctcctgcctcagcctcccaaatagctgggaatacaggcacccgccacaacgccaagctcattttttgtatttttagtagaaatggggtttcaccatattggccaggctggcctcgaacttctgacctcgtgataggtccacctcagcctccaaaagtgctgggattacaggcgtgagccactgcacccggccagttgaggattttatagttgagaataagtgggattatgattagcatgacctctaggaattctttctctctttctttctgagatagagtctcactctgtcgcccaggctggagtcatctcggctcactgcaacctccacctcctgggctcagacaatcctcctgcctccgcctcccaagtagctgggactacgggagtgtgccatcacacccagctaatttttgtatttttttgtaaagactgggttttgccatgttgcccagactggtctcaaactcttgggctcaggcaatcaacctgcctcagcctcccaaagtgctgggattacagatataagacaccacacctggactctaggaaattatttctaagaaaggagtaaaagtgagaatgaatgagtacatagtgtaacgcttccgagctttggtgcaggaggaaagtaaataacaaggataccccagggctggaaacttggcaataaaccaagaaggcagagaccagttagtgcaacactaaaatgcctgaccacttatggggccagagctggggcttccaggtgaaacttcccctaaaatgggcggccacttatggtgtcagagccgaaacttcccctaaaatgggcggccacttatggtgtcagagctggaacttccagctgctccccctctcccagttcttttgtccttgtccctagagttttggtctccaagcaatcggttctgtgtttttgtttgtaggctcaattttaaaccacattttgtaaaggcacttctcaaaaggcaaagataaaaacactgaagctcttaagagcgcctgtctggctgccaagccattgttctactcaaatgtcgaatgaaaagggagaaacagaatgatgattgtatttgaattgcttccaaggaaaagtaacctccagcaaaactctaggcccactttgctagaaatcctggcacgtcggcaacagaaatggaggcagaaaattgcatctttcagaaagcagagtatcaaacaggaaaagccacaaggagtgaggtgctgtgaggttcccgtggtgcaggatccattttatcctttctacttcttcctgctgaaaatgagattatttaaaacaatttaaaagacaattttccctgcaaggggccttttggaaatgagtcaaagtcaaatcccttgttttacgtaaaattaacgtatgacatttcaaagttaccaaactaaaaaaaaggaaaataaatataaacacattccaaaacttaaaaatgaaggagatttcagacagtccctcctggtaaaatgtgaaattgcaccccagctgcagtagctactgtaaatatccaaggaatcagttttaagtgtttggggatcccagggatccctgcaaagcactcaggattttaacattaagctcacaaattacagcagctggccgggcacggtggctcacgcccgtaatcccagcacttttggaggccgaggcaggtggatcacctgaggtctccactaaaaatacaaaaaactagccaggtgtggtggcggacatctgtaatcccagccacttcgggggctgaggcaggagaatcacttgaacccgggaggtggaggttgcagtgagctgaggttatgccattgcactccggcctgggcaacagagagaaacttcatctctaaaaaaaaattacagcaaccaacaggcctctaggttagttaccaccctaacctcttcgttgtaaattttcaaaccaccttgaaggtgggtatttttggtgggtctttatcttcattcattaatcacattatcagacattccctgtgtgtcctgttctgttatacatgctgaagctacaaatcaaacatccgctttgcctccaacaagattccctgttcctaagtgaaccaaggaatgaggtgttccacgcctgagctcacatcttttttttttttttctgtagcccaggctggagtgcaatggcgcgacctcggctcgccgtggcctccgcctcgcgggttcaagcgattctcctgcctcagcctcccgagcagctgggactacaggcgcccgccaccatgcccagctaattttttgtatttttagtagagacggggtttcaccatgttggccaggctggtctcaatctcttgacctcgtgatccgcctgccttggcctctgaaagtgctgggcctctgaaagaacaggcgggagccgccgctcacatctttactcatgaacctaaactcacagagcagccccacactgtcgtctgtggaaaccacaccagctcctcctcttccttctggacctgctgtcccaccctacgcccattttttatctccacccactctttgaacttagcactggtgtctacaggctcgattcccagctctcccacaaggacgtggctcagacgcacgtcaccatctcaacccaatgtaggccacccgctgcaggcgagcttccctacccaatccgacctcctagacggacaccccaggttccagccctacaaggggcgcgtactggcacaacaggcgggcgtggctctcgctccccaggaaggcctcgcagaggtggggacaagggcggatgggaaaggggataagcgacaggagaggggggactcccgttccaaacaaaggggactgcgtactggtgaagaagaatgtggtctgtattcagttttgttgacaagaacccctaatggataataataaaatgtttactgagctcgtactttatggaagacacatggctcacggcagggcccggcacatcacaaaaactcactccgtatttgcagcataaaggaaatctcagtttcagttttaaaagttgtgtgtctaaaccagaaaataactcataacatgatcctactaagaagatgggccaaaaacagacaaaagaaacacgagaacactcaatatcacctcccccaaaacaacacagcattttcctcctgtaatcaaacaatcacaaaccaggctgtgctgggcctggccgttgtgccagaaacagccccagaaccctgggcccaaaggggtctggtcttgattaagattattttcctttgtaacgttcggtttggaggaaaaggcgggagggtcggaaggaaatgggaggagcgcacgatccatcagcgagtttcatcgcagcgtttcatctccttcgtgaactgggctcagggaggccgtgactcccatttccatttggctcccgagtcaatcactcactttcattccagctactttttgtcttaatttcttgacttaaaaagggtttggttgaggccgggcgcagtggctcatgcctgtaatcccagaaagtgaggccgaggcgggcggatcacctgaggccaacagttcaagagcagtctggccaacacgatgaaaacctgtctctactaaaaatacaaaaattatccaggcgcggtggtgggcggctgtaatcccagctactcaggaggctgaggcacgagaatcgcttgcacccgggaggcagaggctgcagtgagctgagatcgcgccaccgcactccagcctgggagacagagactcagtctcaaaaaaaaaaaaaggccgggggtgggggggcgggtgtttgttgaatccttggtgaatttaaggactcagaaaacaaagtaagttaaactacgtttccacagcctccttcctcattaaaaatgtctctgcagccaggcaaggtggcgtgcgcctgtagtcccagctactcgggaggctgaggcgggaggatcacttgaggccaggagtttgaggctgcagtgagctatgattgcaccactgcactccagcctgggcaacagagtaagaccctattgctttaaaaaaaaaaaatgtttcagccaggctcggtggctcacacctgtaatcccagcactttgggaggctgagggtggatcacgaggtcaggagatcgagaccatcctggctaacatggtgaaagcccgtctctactacaaatacaaaaatcagccgggcgtcatggcgggcacctgtagtcccagttccttgggaggctgaagcaggagaatagcttgaactagggaggcagaggttgcagtgagccgagattgtgccactgtactccagcctggtgacagagtgagactctgtctcaaaacaaaacaaaaaaaaggttctggaatgattattccaattaaacagcttttattacaatactctgtcaatgcagggcaatcattccttaagatgctagaaaacgtgttattgtaacacgaggaaaaagccctgtaatctcagcacaaccagaaattaaagtggcagttttgggaggacgcagtcaaacggctttctacagcacctcctcgtatcgtgggttacagaacctacgtcgtcctcggaatccccgcattcgtcccacgcggccctcagacacgggctctggttcaaggtgggagacagagacaacaccaatcagcccttaccaggcagtgcgtggctccagaacaacaactgaaaataatattggaacgcagtccagaaaatacaactaggggcagagcggtccggcacaaaacaccaggaaacgctctcccttccatcattcaatcttggcggaccacactggtatgcgacctcatctagctacatagctacacctccctcttgtcaccttgcagactggtattcactaacccccaggccatggcggaaaatgtaccttccatctctctctgcctcagcccccaccggcacccttggtgccttcatcacccatccagagcaactacccacttccacggcctcctccatgtgaggacctccgcctccaactctcttcgagccaccacgcggtgcaaatgtttgtatttttggtggagacaaggtttcgccatgttgcccaggctggtcttgaactcctgggctcaagcgatcagcccatctcagccgcccaaagtgctgggatgacaagcacgagccatcacgcccagtctacaccccgaaatccaacattacaaacttatcaatgctgcctcctgtcatctccccccgcccctggctcccgctttgacctggaggaatctggcaacgtcaacatcaagtgattgttcaaattcagccaagggggccgatgaggtgcccatgtggctctcctcccagccccgagcgcctggggatacctaggccctcctgtcatgccccaaggccaatgtagccttggggatgccgagcctgcctgatcccaattcctccagcgttctcctcccagggttccgctccctccccaagtgaccagccctcaccagctcactccagctctgcagcgttctcccaggctctcaaccctcgacgctcatccaggttcattcgccatccgtatgccctagcccagggtgggtctcatcaactgtaccctcactggcagcacccaggacgttctcaatgaggtcttcattcataccgccttgccaatcgccctcaaaatcacctggaagattccaccgttcaggaagccttttttttttttttcctttgaaacagagtctcgccctgttgcccaggctggagtgcagtggtgggatctcggctcgctgcaacctctgcctcccgggttcaagcgattctcttgcctcaacctcccgagtagttgggattacaggcgcccgccaccatgtccggctaatttttgtaattttagtaaagacggggttttgccatgttagccaggctggtcttgaactcctgacctcaagtgatcctcccaccttggcccccaaaagtcctggatgacaggtgtgagccaccgtgcccagcctctatgtgacctttatatgtttcttaacctctttgtgactcagttttctcatttgtaaaataaagagaagagcatctatatcacagctttgtagtgagagttagacgggacggcgttcagccaccctcagagcagcggctggcacacaggggagccccttcctctgctcactccttcctcttcctccacctacagggtcaagtctttaccactcaaaaggtaactgtttatccccaggcaacctctatgttcctctggctcagccccaagctccctgactcaccacagcctcctcctaccccggctccctctccgcactcacaagccggctctcagcggggccaccaacaacacccagcggaacccgtcatcttgttccggtccacggcgccccctgaaactgctgctttccatcttttcctcgaaacgcttcccgcacctctcctggcccctctgcatctgtggcttgtccttggtcccctacgccagcccctctgcctgcccctgaatgctgggggtgatggtttcacccttggctttctcctcctgtcccgaagatgagtccatctgctccagcacgctagacaacacctggccggcccaggctctcatcctcactgcccctggacaacacctggcaggcccaggctctcatcctcactgcccctggacaacacctggccggcccaggctctcatcctcactgcccctggacaacacctggccggcccaggctctcatcctcactgcccctggacaacacctggccggcccaggctctcatcctcactgcccctggacaacacctggcaggcccaggctctctccctcattggccactggcatctcttctgggctctacctgcccgcagtctcacctgtatcccaagggaacctcaaactcaacatttctaaaattgaggttaccgccttcctccaacctgcttctccctctgtatttcttatatagactgaagacatcgctgtcaacccagctccccacatcaaccctttggtagtagactgggcaaagggcctcattctaagaaacccttttcagcgggtaactgtgactttgttggccaacagaaacgggttagccctgtattcagggatatgacttaaagctgtaagaattggccaggcacagtggctcacgtctgtaatcctaacactttgggaggccgaggcaggtggatcatttgaggctgggagtttgagaccagcctggccaacacggtgaaacctcatctctaaaaatacaaaaattagctgggtgtggtggcgggcacctgtagtcccagctactctactcgggagactgaggtaggagaatcacttgaacccgggaggcagaggttgtggtgagccaagatcgtgccactgcactccagcctgggcaacaagagcaaaactccgtctcaaaaaaagaaaaaaagaaaagtgtgagaaccattagttggaaataggatggggccacgaataaaatctaagcgtacattccaaaatcaagagcttaacaaaagacccagttagcctgaggtacagaaccaggaggtgctcaaatctggggctgagagccagagagacgtcagaaggtgagaagtgcccagccaggactccactctgcgttctttgttttgtttttgagacggagtcttgctcagttgcccaggctggagtgcagtggtgcgatctcggctcactgcaacctctgcctccggggttcaagcgattctcctgcctcggcctcccgagtagctgggactacaggtgcccgccaccacacccggctaactttttgtatttttagtagagacggggtttcaccgtattagccaggatggtctcgatctcctgacctcatgatccacctgccttcggcctcccaaagtgctgggattacagacgtgagccaccacgcccggcccactctgcattcttacaaggtgccgtgtgtggctcccagggcctgagctgggagcccagagtcttcatctcctccctacttctcacttcaactcgacttactcacctcccaagttctcccggactctgtctcctgttttactttccttgacagcattatccacgagttcaggacttctctttgccttagggaccaccacctggacggcgcggtggctcacacctggaatcccgacactttgggaggccaaggcaggaggtttttactacaacatctccaggcagggcccttgtcttattcactctgtttacatccacctgggtgccactccagtgtttcgcacagaaaaataaccacgttggtgcaattacttgtgcaccaacttaaagcaagaccccgctttacaccaaaaaaattttatattagtcaggtgtgttggcacatacctgtagtcctagctaccccggaggctgagacgggaggattgcttgagcaagtctaggctgcagtgagctgtgatcacaccactgcactccagcctgggcaacacagcgagaccgtgtctcaaaaacaaacaaaaatttttaattaattttaaaataaaggccatcccatccaagcaaaaattggaaaatgtaatgttcaacaacatatccatatagtcactatttgcagacctgcaacgtgcaggacactgcgtccagcattggggacaggtcctcacagagtttacgctcttgtaagaaaacagacatcaaatatccccaaaacatatgtaactagaaactttgataagcagcataaaagaaacagataggacacaagtgcgtttgataccagaaggacaacctcatcgggggtcaggaatgatgaaacatcaagcaagagtgaagatgaaacacttggtaatatttgatgagcgaggagaatattcgtgagatagttaagtggaaacgacaaaacgacaggtatatagttaaaccccacttttgtatttttttaagtatattttacagaagaaaggaaagatatacaaataaagtgcaaaatgttagcagtggggaggtttatgattcctatattctagtgcttttctacatttttcaaattctcaaaaagtttttttttttttttgagacagggtctcactctgttgcccaggctgccgtgcagtggcacgattctgggctcaagggtcttcccacctctgcatcctgcatatctgggaccacaggtgtgtatcaccaaacccgactaattttttattttatttatttgggacagcttatttatttattttttgagatggagtttcgctcttattgcccaggctggagtgcaatggcgcgatctcggctcactgcaacctccacctcctgggttcaagcgattctcctgcctcagccccccgcgtaggtgggattgcaaggcgtgagccactacgtccggctaattttgtatttttagtagagatggggtttcaccatgttggccaggctgctcttgaactcccaacctcaggtgatccgcccacctcggcctcccgaagtgctaggattacagggatgagccactgcgcccggccgatttttaatttgttgttgtgatagaacatacataacagaaaatgtcctatttcaagtgtgttccggtggaccgtcctgcagcattaggtgcatctcctgttctgctaccatcaccaccatctgtctccagaactttccatcttcccaaactgaaattccgtcctcagtaaagactaactccgttccgttccgttccgttcccctgctccccagccccagcccttggcagcaccaagcctcattcagttttaaaatgcaaacattcaaagaccaagcctcattcacaccttcggtgtaagttactttcatctgcgaaactcccatcactcagaaaggaatgcccaggtaaaggcaggaagtacaggtacacagagctggagacaggcctgggtggcaatttgggatgggggttgggagaagagattttacaagtcagatgggaaggaaaagtaactatttgctttgaggtttggcccagggccttgggagcagccggcggattcaggtgtaagaactagccaccaaaagcctctgcatctcttgttcaaagctgattgtctcaggtttgactgtctcaggctttggtgtctcgcagaagcaccaaaggagaggacagggaggaagaaagaaggggtggaaaggagatacagagacttaagtcaagaatgaggcctcccgcctcccggaaagcaaacctaggaatactcttgacagctggtcacactgcacctgcctgaacaagtccagtgacgggtacaaggaggccccaacattccagagaagcacatccaggcagcttcagaaaccccaaacccaggaacacagaggaggctggagaggcttctggctttttcctgattgactgactgagacagagttttgctcttatcacccaggctgtaatgcaatggcgcgatctcagctcactgcaacctccgcctcccgggttcaagcgattctcctgcctcagcctcccgagtagctgggattacaggcgcccgccaccatgtctggctagtttttgtagttttagtagagacggggtttcaccatgttggccaggctggtcttgaactcctgacctcaggtgatccgcccgcctcagtctcccaaagtgctgggatgacaggcgtgagccactgtgcccagctcctgatctgtggtggttgttgctgctgttaatgtctcacctctcactacaactccccattcaactttctctaaaaccacctcactcatacaaacgttgccctggctcaagcaactgctaaaatgctcacgaacgtccctgttccccaagaagtacatggtgggcttgctcccagcacagcaaaaagtcatcattccagtctttagtttatccaaaactccctttctctggctaagagctatcacttctttagataatctttgctttttcttccctgatatcaccaatagtagcagctgattctcgttgcaaaagagccatttttcacaaagaaagttttaatgacttaagagttagcagctgggctgcaatgcaaatctatgtcttagcagaattatgacctgtcaggaatctctgggatggatgaaagctctcaagattcaagacaatgttagatccgcacattctcagtatctaccgtctctgtctctatttttctcctccttccctctttcaagagacggatctcactctgtcacccaggccgtagtgcagtggcaccgtcaatggctcactgcagcctcaacctcccgggctcaagcaatcctcccactccagccctccaagtagctaggactacaggcatgcaccactacacccggctaatttttttattttttataaagacagggtcttgtcatgttacccaggcaggtctcgaactcctgggctcaagcgatcctcccgcctcagcctcccaatgctaggattacaggcgtgagccactgtgcccggctctcctcccctctcttttctctttattaacaggagtatcccatgttttttgttttttttttgtttttttgttttttttttgagacaaggtctggctctatcgcccaggctggagtgcagtggtgcaatctcggctcaccacagcctctgcttcccgggctaaaaccatcctcccacttcagcgttccgagtagctcagaccacaggcgtgcaccaccacgtcggctcatttttgtattttttgtagagatggggtttcgtcatgttcccaagctgctcaaactcctgagctcaagcgatctgcccgccttggcctcccaaagagctgggattccaggcgtgagccaacgtgtctggccatcccacacatccctgggatttgtagaacaaggctctgggtaatgaaagagtctggggataaacacttttgcccatctcccatccaatgcagccaagaaaactgttcataacaaccctgggaggtgagtcagtgatccaatgggaggctggaaggagtatagaaaagggaggtaagagaagcaaaagtaaggccaggtgcggtggctcacgcctgtcatcctagcactttgggaggccgaggtgggcggatcacgaggtcaggagatcgagaccatcctggctatcatggtgaaaccccgcctctactaaaaacagaaaaaattagccaggcgtggtggcaggcgcctgtagacccagctacttgggaagcggaggttgcagtgagccgagattgtgccactacactccagcctgggcgacagagactccatctcaaaaaaaaagaaaaaagaaaagaaaagggaggtaaaagaagcaaaattaggactgggtgctgtggctcacacctggaatcccagcactttgggaggccagggcaggcagatcgcttgagctcacaagttccggaccagcctcggcaacaaggcgaaaccccgtctccacagaaaataaaataatcaggcgtggtggtgcacacctgtggtcccagctacttaggaggttgaggcaggaggttgcagtgagccaagattacgccattgcactccagcctgggtgacggaagtaaaaccttgtctcaaaaaaaaaaaaaaaaaaagcaaaagtagccaggatggtttgcaggaggagcagaaggaggcgggctcagtgggagatggcccacgtaaccagtcagacagcgatggtttgcgggaggagcagaaggaggcatactccgtgggagacggcataaccagccagacagcactggctctcagaggcagagaacaaaagggacgggcttagagggagaagtgaagcccatttcaaaagaactcctagagacagccgtgcccactcgccccctcaccagcttttctttaattactgagtctgcacgtgatgttccttataccacctggactctcaccaaccccagctgcttgtgttaacaaagtcaacctctctgagaatctgggctggtggtcattagcaaagagaggcgaggataaacatcctagataaagggaaaccacagattgtaaacttgaagaggactctggccaagaatctggaggagttacttaattcacagggttgtggtaagggactaatgagaatgcagacgaaggtgttttgcaaagaaagtgccataagcatgcgtcactaggaaagctgatgtatgagcagtctgcaaagtgggggtctcaagagcacagagtccaggcagcgggggtctcagccacagcaccacctctttaaaaagcgacacccagctaacttcacatctcattccaaagagtggcagtttgggtaacgtgctctgccaagcacatctgacttcatcagaaaagcattcggtgagatttcctatggaatccttgtggacaacatagatccacaggctggataatgtgaactggtaactggccaaccaccacacccctgaagcttggattagtggatgaataccattaacctagagggaagtttctcactgtgttctaaaaagatccattctggctgtgctcatctcaacattatccttaattcccttgaaaaagtactggaaggttgggcgcggtggctcacgcctgtaatcccaatactttgggaagcggagacaagctgatcacctgaggtcaggagtttgagaccagcctagacaacatggtgaaagcccatctctactaaaaatacaaaaattagccgggcgtggtggtgggcacctgtaatcccagctactcgggaggctgaggagggagaatcgcttgaacccgggaggcggagtttgcagtgagccgagatcatgccactgcgctccagcctgggtgacagagtgagactctgtctcaaaaaataattaaggaaataaaagatactggagaataccgctcacatgtgcagatatcaagaagactagcagatgagcaaatggcctaaacgcgtaatcagctgtataaatgcaatacacatcataacttttaggaactgtttgcaattcacacttaattcccacagagtaaagccgaggccttaaattagtgaatggcatatgtgctttgtttggctttgcccaatgtcaagaaaaattttaactggctaacagcatgtaaaacttaactagcttcacataaaaacccagtttgttagcttgaaaaatcagaagagctggcaacgtcggccttcattacggcaacaggcagctggaggtgagcgccggctttccccgagggctggctgcggccctccactctgtcccccaccacctggcccaggccactcgcttcacctgcctggccctctactggcatttgagttggtgagtcctgcaggaaaacactggttcacgttattaaatatgtccaattggctacacgttttgactgtgcacgaaactccagctcggtcttcacttacagcttttgcaggtttagctcctgtagcaagatccaacatctgatctcacagcttcacaatgacaacctgtctgtgaagaacatcccagttttccagtgtgcccccctaccctctggtttatttaaccttcccaatattccaggaaggctgggcttattgtccaaaatagaagggcgatcaaccagctaacaggaactaaaaccgggatttcaactcaggacttgggttcaaccttagcttagcatttcccaccatacctaccacgcatccctcaatccctggaggcggctctgattccagactgacccaaccggaggaggctcaagtccaggttgcaaagcagctgggctgctctggaaagagcgtttggaatccttgcttcacttccgtttttaatcttcttaaaaaaaactgtgtagtagtgtttaatccaaagacagctgattcccatttacacgtaacctgttgaactcacatactaaattttaaagctctgctctcgaaaatgcagtttgctctttaagatctccttggtaacacatctaactggtatctgaactacagaaaaaaaaaaaaaactttggaatcaatcaatgacgggggttagaataaaatccaactcaggaaagtaccgaagaaagttccagaatgacagctgtgtagccgacccagagaaccacctgtgtctggaatggaggaggactggtaactcccaggaaaggggactctccaagttaaaaaggggactcaggctgggtgcagtggctcacacctgtaatcccagtactatgggagactgaggcaggcagatcaccgtgaggtcaacagttcaaaaccagcctggccaagatggtgaaaccccatctttactaaaaatacaaaaattagccagtgtgatggcggatatctgtcatctcagctactcagcagactcaggcagaagaatcacttgaagccgggtggcggaggttgccagtgagttgagatcgtgccattgcattccagcctgggtgacagagcgagattccgtctcaaaaaagaaaaaaaaataccacttgaacttgccacaaacaatatttacagacacaacaatgcccctattgattgactggctgattttcaactacacacaaagcatgaatcccggtgacacaacacaatgtaaatacgaacaaccttgacaaagctaaaggtacaaaaaataggaaggaagtgcaggagacctgatgggcaggatagaaagacaccaacgttcccaaagtcctattgaaggataaggagtaaaggcataaacatgttattaaatgctaaaagtgtaaccaggaaaaccgtaaatggtggtataccaagaggacaaagaaagttgagtttgctttttttttttttttagacagaatctcgctctggttgcccaggctggagtgcagtggtgcgatctcggctcactgcaacctctgcctcccgggttcaagtgattctcctgcctcagcctcctgagtagctgggactacaggtgtgagccaccacgcccagctaattttgtatttttagtagagatggggtttcaccatgttggtcaggctggtctcgaactcctgacctcatgatccgcccgactcagcctcccaaagtgccgggattacaggcgtgagccaccgcacccggctggtgagtttgcttttaagggagctaaatcgatctctagcctagcagaaaaccaacacataatgttgaagttcgccgggtgtggtgtcgcacgcctgtaggcccaacgacacaggaggctgaggtgggagaattgcctgagcctagcaagtcgaggctgcagtgagctgagatcgcgccactgcactccagcctgggcgacagagcgagactccatccaaaaaaaaaaaaaaaaaattagctgggtgtggtggtgtgtgcctgtaatctcagctactggagaggctgaggcagaagaaatgcttaaacctgggagacggaggttgtagtgagcagagatcacaccactgcactccagcctggtgacagagcaaggccctgtctcaaaaaaaaaaaacaagaaagataaagtcatataataagcctatgtatactacttgattttgttttcgccataagcacatgttatttattttaaaaaaatttttggccgggcgcagtggctcacacctgtaatcccagcactttgggaggccgaggtgggcggatcgtgaggtcaggagatcgagaccatcccggctaacacagtgaaaccctgtctctgctaaaaatacaaaaattagccgggcgtggtggcaggcgcctgtagtcccagctactcgggaggctgaggcaggagaatagcatgaacccgggaggcggagcttgcagtgagctgagatcacgccactgcactccagcctgggcgacagagtaagactccgtctcaaaaaaaaaaaaaaaaaaaaaatttttggccgggcgcagtggctcacgcctgtaatcccagcactttgggaggccgaggcggggggatcactcgaggccagtagatcaagaccagcctggccaagacggtgaaaccccatctctactaagaatacaaaaattagccaggtgtggtggtgggtgcctataatcccagctaatggggaggctgaggcaggagaatcgcttgaacctgggagacggaggttgcagtgagctgagattgcaccactgcactccagcctgggcaatagagcaagaccctatctcaaaaataaaacaaaacgaacaattttagaaatgtttaattatttggaatcctggaaaaaaaagctaaggcaaagctgatctgaagagtctgtctacctgcccagctaccaacccaaaccggccttgttttggtcctaggcggcggttcttaaactctggtccctggacgtacggcttccgggttgcctgggaactgttgctagaattgcaaactactgggccccagcctggacctaccaagtcaagaactctgggatggggcccaggaatccgcatttaaccagtccttctggttattcatcagtttggaaaccgcaggtcttcagcaaaacaaaactctgaggcggcgttgggtccagtcgtcgtctcctcagcgagtaaggcagcttcaggggaaggcctgagccccttctaagaaaacacaggctggattttaaaggatctctagggctagtttccccaggttctgggcccctgccctgtgtgagctctagtggggtcagcagcaaggacccatcaccggaagaggcttctgagaggcaccgacttttgccatcagtgggcagcgagtgggctgtgtggtccccggacaagcagctgagtgggtggggagtgccttgttgtggccggcttcgcataagtcatctgcgcccgccaccacgccaggctaatttttatatttttagtagagatgaggtttctccatgttggccaggctggtctcgaactcctgacctcaggtgatccgcccgcctcggcctccctcagtactgggattccaggcgtgagccaccgcgcccagcccagcccgtcctcttgaacctgctcagtttcagtcgtcatgaccacttgtaatatcccttcccactaacatcaaaggctgtggcccgaagctcccaagtgggcgaaaaagtcccgagaggttccagaaggcaagatcattctggggccacgaggaccgagaaacgacacaaccaaccacagaacagaaaactcttgtggatctgatgtgattctgtactccagatttgcagttaccacttacagaagccaacgtccacctctgaaacacagaaccccctaactggtgcgaggcagctgaagacaaagttgaggcctttgggagaagagctcggccagaggaggaaatctgattagtaaaaagataggcagccaagaagtaaattaaatgaatgctcacagagaaagcactcgagacaggagcgggagagactccgggcacacatcgcgacagggacagaaaagctttcaggatgggggtgggggaaggggaagaactggttttctaatattagactcacgacatgctcacttcccaaatcccagccaaaatgagggccccttgactccgacaagcccaggccaccttctgcttggatacacactttctgcaccaggactctgcgtgaatgccaaggcaaattccatccctctcaactccccaccgcaacaccaaatgactcacacagcttatcttgaaattccccctttcatcttggcctcccactaacttaaaacaatgcaataagaacacattcaagacacctccagtaaatccatatccgtattattcacgaggcactaactagaaagctgtttatcctgaagcctacgtggtcaactttagaaatgtgccttcgtgtaagctggtttttataaaataaataaaaagcctccacaaataccagaacacttatcaatttggactaaagtcgtggattccaatacaagcagccaaggtcctcaagcctcaagcataaacatcccttgccttttattaattgaaaaataaacaggaggggaaatgggtggcatgcctcactatgtgatttaaaacaaatgacacgatgttctcaaacttcaattaatttttaaaaaggcattttatttttcactttatgattataaaagtcatacatgcagactatggggaaatttagaaagtacaataagaaggccaggcgccgtggctcacgtctgtaatcccagcaccccgggaggccgggcgcggtggctcacgcctgtaatcccagcactttgggaggctcaggcaggcggatcacgaggtcaggagattgagaccatcctggctaacacggtgaaaccctgtctctactaaaaatacaaaaaaattagccgggcgtggtggcgggcacctgtagtcccagctactggggaggctgaggcaggagaattgcgtgaacccgggagatggagcttgcagtgagccgagatagcaccactgcactctagcctgggcaacacaacgagactctgtctcaaagaaaaaaaaaaaaagtacaataagaagaaaacttacttctggaagtaagagaagtatagaaagtcatttctggaaaagacgctgaattggtgacttacagtcaagaaattcccaagtctggccaaattccaacccaaattctcggccaggcacagtggctcatgcctgtaatcccagcactttgggaggccaaggtgggtggatcacctgaggtcaggagttcgggaccagcctggccaacacggtgaaaccccatctctactaaaaatacagaaattagctggtcgtgatggcacgcacctgtaatcccagctacttgggaggctgaggcaggagaatcgcttgaacccgggaggcggagggtgcagtgagccgagatcgtgctatttcactacagcctgggtgacaggaagacgccatctcaaaaaaaagaaaagaaagaacattcttttagcccagtcccaagcggactgtctggacagagtcctcacttgctgccactcattattgcatcattttgctgtgctctttatttttttttatttatttattgttttttgagatggggtctctcaccctgtctcccaggctggagtgcagtggtgtgatctcggctcactgcagcctccactacccaggttcaagtgattctcctgcctcagcctcctgagtagctgggatcacaggtgcatgcactaccacgcccagataatttttgtgtttttactagagacagggttttaccatgttggccaggatggtctcgaactcctggcctcaggtgatctgcccaccttggcctcccaaagtgctggaattacaggtgtgagccaccgcgcccggccttgctgtgctctttaaacagccgcaggactctgctccaattccttcgtatctgggaatcctctggcacaaaacccccacctcctatatcatgtggtctgtgtgacagccagaaaccccccagctgaagaacactgagaagtgggaggcttccgctcggtcatggccggcgggacaaggagatgcttaaaggtctggcaaggttgtaggaaaagaccaagacacttcaggatccagctttaggatgtgctggcggctgcaacaaacatgcactctgatcaatgagctctgcgctcattcactccacacgtgtttactgagcgtctactgtgtctaagaccctgagctctgcagaacacgcccaggaatcacagaaggagcttgctctgagagctgggagagcctgctattcatgcgggtattgactgttgccatcctgcagaacaaagccagctttcataacatcccactagataccatgccagccacatccttgcctggaataaaacctgcagcctaggccgggcgcagtgactcacgcctataatcccggcactttgggaggtggaggcaggtggatcacctgaggtcgggagtttaagaccagcctgaccaacatggtgaaacccagtctctactaaaaatacaaaattagctggatgtggtggtgcatgcttgtaatcccagctactcaggaggctgaggcaggagaatcgcttgaacccaggaggtggaggttgcggcgagccaagatcgtgccactgcactccagcctgggcaacagggcaagattccatctcaaaaaaaaaaaaaaaaaaaacctccagctcctgcttgtgcttccatcgattgtcctccaaaagatggctggagtgtgtccctctcaccagcacgccactcgattcaacctatggactcaagacacgccatcgggctcaatgctgtggggcctggtggaagcaacctcctgttgttagaccagaaacgtcccctgcgacaaagcctttggttttgctttgtgttcttctcccgtggggtggaagagccgccctccctctgaggcactgcagcgacgggtgccctggtgagtgtccacggtgaggtggtgagtgtgcaccacacacaacccggccagcatctgcccaggtcaagcccatcctgtcagtgcacacgccgcgtgctgccaccacccagctcgatgattctctccttccacaccttccggtccccaaaagtgactgaaagcaggattctgctgcggaaaaactggacttggaggaagggcaggagagaagggcgaggtgtgtcggcctgcctcaggtctggggtgcccaattctggttgtgcaaacagtgagggaaaaaaagggtgctacgatgtctggctaaaacggggcatcagagctgtcggcggtaccagttttcagaatccatggatttataacggatttcttttctaacttgcaaacgcatacgagatacttcacagaggtattacagttaagtcacacttccccacataagctcacctttaatgaaaaagttaaaatgacataaaactgggagtgttccagaaaaggcaggcctgtgttcaccatcacaacacctatggatagaaaagaggcagaaaggccgggtacggtggctcacgcctgtaatcccagcactttgggaggctgaggtgggaggatcagcttgaccccaggaggccgagattgcacaaccgcattccagcctgagtgacacagtgagactctgcagcctttactgcagcctttgcctcccgggctcaagtgatcctcccacctcggtgtcctgagtggctgggattacaggcacccagcaccacgcccggctgattttttgtattttttgtagagatggggtttcatcatgttggccgggctggtctcaaactactgagctcgggtgatccgcccgcctcggcctcccaaggtgctgggtgcattttttcttaaggaagaaaaaggagggcagggggcaaggtgcagggcaaaaaagaagagcccaggagtccaagagggaagcggccagaggaaacggaaggaatcagcttccaacagggacccacaaggctgcttgagaactcaggacacaaggaacacacctggagaagggggctctgcggtgatccgtacacagtgagaaccaaaggggcagcttcagggaaaacaggtggggagggacaaaaggagggaaaagccaaaactctccgtcatcgagaggaacgcacacttctccgaggctattgccggttcaagctcgtttccttcagaacacacccccaaagttcctggggtccccccaccgccctccccaacacacacactcactccaatttcactcttttctgcacagattccagggaagtatcctggagacagacatcaaaggcatccgagctggcagcccacaacaggtcacgctgtcacggggacgccgggaaccacatgaaaagcagagaattcacggggcgttcgatgatgatgattattttttaaggagctcagaaatgtctttcgtttcagttttagtttaaggacagctacctctgggggaatggctttgaagtcacatagcccagagcagcgctcagcagccacgagggaagaaaaacgctgcgcccagcggaaaggccacaggagccacggggcgcaggggccgtcgctgaagaagaacccagaaggcttctgcttttggtacaaggacaggaaggaagaggaatggctgcagctgggaccacatttgaaaacccaccaaggccaaccttgcaatggccttctgcgtagcagcaaatacacagaggttaaggggcagaggccccaggagaaccctgtgaatatgcctattcggaggggtcagggtcagaggacaaaagaggccggagaggaacaagctttccacttgggcggttttactgctccagaaagcagtttttgaaaagcacgagatgatgggaaggcccaggtcggcggttagatctagagcaggcggcaagagcttgccctgatatgacagcaagtgagctggccacaaacacagctcacagctagtgcgaaggccgagccaaagaaaaggtccccagcccggccgggcgcggcggctcacgcctgtaatcccaacactttgggaggctgaggcaggcggatcacgaggtcaggagttcgagatcagcccagccaacatggcgaaacccccgtctctactaaaaaaatacaaaacttagccgggcttagtgacgagcccctgtagtcccagctacttgggaggcggaggcaggagaatcacttgaacctggggaggcggaggtcgcagtgagccgagattgcgccactgcactccagcctgggtgacagagtgagacactgtctcaaaaaacaaaacaaaaaacaaaaacaaaaagaaagaaaacaggcaaaatcaaaagaaaaatgatgaaaaagaagataaaattaagaacagaacaggctgggcgcggtggctcatgcctgtaatcccagcactttggtaggccgaggcgggcggatcacttgaggccaggggttcaagaccagcctggccaacatggcaaaaccccgtctctactaaaaattagctgggtgtggtggcgggctcctgtaatcccagctacacgggacgctgaggcaggagaattgcttgagcctgggaggcagagactgcagtgagccaagatctcaccgctgcactccagcctgggcgacaagggtgagactccctctcaaaaaaaaaagaaagaaagaaaagaacaaatgaaaggaaaatgagagctaaaaatataacagaatctttgacctagcaattcctcttctaggaatttatccttagagaaccaccaaagatgtgcacagagaagaatataaaaacaagtttataacagcgctggttattccagcaaaatctggaactggcctacatttcctatcataggaaactggaaactattaaatatggtacatatatacacatagacagatagatacagcaaaataccacgtaactattagaaatcagctttttttttttttttttgagacaagagtttcactcttgtcacccaggctggagtgcagtggcaccatcttggctcactgcaatctctgcctcgcaggttcaagtgattctcctgccttatcctccccagtagcagggattacaggtgcccgccaccacgcctaattaattcctatatttttagtagagatggggtttcaccatgttggccaggctggtctcaaactcctgacctcaggtgatcctcccaccttggcctcccaaagtgctgggattacaggcgtgagccaccgcgcctggccagagatcatctttttaaagaatacgttcttacatgaaaatacactcaaaatacatcctaattgtgtaagacacacacgtacgtgcctacataggaaaagacaaggctgccttgtgatgtcggaacatccatgcttctagctagggggtctgcaggagactgatcccccacatgctttttttgtattcgatgatccattattactttttaaaaaatataatttgcaggcatgagcaacactgtggcgggccctgcagtggggcagggagagtgcagtcaactcccgcttccagtattaccttttttttcttattttttttttgctgtcatccaggctggagtgcagtggtgtgatcatggctcactgtagcctcaaactgccgggatcaagtgatcctcccacctcagcctcctgagtagccgggaccacaggcacaggccaccacgccagctaactaatttttgtatttttttggtagagatcgaggtgggggggtctcagtatgttccccaggctggcctcaggtgatcctcccacttctgcctcccaaagtgctggaattacaggcatgagccactgtgcctggcctcaatttttttttttttttggtctctttctccccctttttgtggattatagggtttcgctatgttgcctaggcaggtctcaaactcctgggctcaagctatcttcccatctctgtctccttaagcgctgggattacaggcgtgagccattgcacctggcctcaatattacttttaaaagaggaaactatcccaatagatgttttggtaaaaagaaggaaaaagggccgtgggcaacttccaaacgcaatgtctctgttaaaaatcaattccactgaggtcaaaagcccctaacgaagacatcacccagaccctttcaccactcagaaccaggtacggacggcatgcctcatctcacaacagcccagcgggctttgcaggacccttaaaaacaagattccagggcacagccatgaactcacatcacaccttcctggatttacagtgaacaagattccagggtgcagccatgaattcaccaaacaccttcctggatttacagtgaacaagattccagggcgcagccatgaattcagatcacatctccctggatttccagtgaaatagattccagggtgcagctatgaactcacatcacaccttcctggatttacagtgaacaagattccagggtgcagccatgaattcaccaaacaccttcctggatttacagtgaacaagattccagggtgcagccatgaactcacatcacaccttcctggatttacagtgaacaagattccagggtgcagccatgaactcacatcacaccttcctggatttacagtgaacaagattccagggtgcagccatgaattcaccaaacacctccctggatttccagcgaacaagattccagggtgcagccatgaactcacatcacaccttcctggatttacagtgaacaagattccagggtgcagccatgaactcacatcacaccttcctggatttacagtgaacaagattccagggtgcagccatgaattcaccaaacaccttcctggatttacagtgaacaagattccagggtgcagccatgaattcaccaaacaccttcctggatttacagcgaacaagattccagggcgcagccatgaattcaccacacacctccctggatttacagtgaacaagattccagggtgcagccatgaattcaccaaacacctccctggatttacagcgaacaagattccagggcgcagccatgaactcacatcacaccttcctggatttacagtgaacaagattccagggtgcagccatgaattcaccaaacacctccctggatttacagtgaacaagattccagggtgcagccatgaactcacatcacaccttcctggatttacagcgaacaagattccagggtgcagccatgaattcaccaaacacctccctggatttacagcgaacaagattccagggcacagccatgaactcacatcacaccttcctggatttacagtgaacaagattccagggtgcagccatgaattcaccaaacacctccctggatttacagcgaacaagattccagggtgcagccatgaactcacatcacaccttcctggatttacagtgaacaagattccagggtgcagccatgaattcaccaaacacctccctggatttacagcgaacaagattccagggcgcagccatgaactcacatcacaccttcctggatttacagcgaacaagattccagggtgcagccatgaattcaccaaacacctccctggatttccagtgaacaagattccagggtgcagccatgaactcacatcacaccttcctggatttacagtgaacaagattccagggtgcagccatgaattcaccaaacaccttcctggatttacagtgaacaagattccagggtgcagccatgaattcaccaaacaccttcctggatttacagcgaacaagattccagggcgcagccatgaattcaccacacacctccctggatttacagtgaacaagattccagggtgcagccatgaactcacatcacaccttcctggatttacagtgaacaagattccagggtgcagccatgaattcaccaaacacctccctggatttacagtgaacaagattccagggtgcagccatgaactcacatcacaccttcctggatttacagtgaacaagattccagggtgcagccatgaattcaccacacaccttcctggatttacagtgaacaagattccagggtgcagccatgaattcaccaaacacctccctggatttacagcgaacaagattccagggcgcagccatgaactcacatcacaccttcctggatttacggtgaacaagattccagggtgcagccatgaattcaccaaacaccttcctggatttccagtgaacaagattccagggtgcagccatgaactcacatcacaccttcctggatttacagcgaacaagattccagggcgcagccatgaactcacatcacaccttcctggatttacagtgaacaagattccagggtgcagccatgaattcaccaaacacctccctggatttacagtgaacaagattccagggtgcagccatgaactcacatcacaccttcctggatttacagtgaacaagattccagggtgcagccatgaattcaccaaacacctccctggatttacagtgaacaagattccagggtgcagccatgaactcacatcacaccttcctggatttacagtgaacaagattccagggtgcagccatgaactcacatcacaccttcctggatttacagtgaacaagattccagggtgcagccatgaattcaccaaacacctccctggatttacagtggggtggcccggcactagaccctcctcccttccctgcaccaacatacttcatcgttttaaaataaccgtcggtttcttaaggtaaatattaatgttagcccctgcgcaggcatcatcattctctctctcgactaaaatgtttgtgaactttaaatctgtcaactgaggtgcttgtcctgcatgaagttacccagcgaaccaccgactcccagctctgtatgaactacccaggttcgaggacctccagagaaaggtcaccaacagggaaaggaggctccacggaggtcgactggccagagggttctaaggtcacagagggaaggcccagagaggccccgagtgatgacctcaagcacgtctgttccccacgtgccgtaactttctaagttactctgcccagccttgagatcccaaaaaaaagtaacatctggtcattaaatcatatctttcttcaaaagaatattaccgggctgggcacagtggctcacgcctgtaatcccagcagtttgggaggctgaggcaggcggatcacttgaggccaggagttcaaaaccagcctggccaacatggtgaaaccccgtctgtactaaaaatataaaaattaaccgggcttggtgatgcacgcctgtaatcccagctacgactcggggggctgagacaggagaactgcttgaacccaggaggcggaggttgcagggagccgagatcgcgccactgcactccagcctgagtgacagagtatgactccgtctctaaaaaaggaaaaaaaaatggtgaagacagtaaattatgttatgtatattctaccacaattcttaaaataatgttttttaaaagttgtttaactcgacaatccttctcctaaaaaaaaaataacaatatttggccgggcacggtggctcacgcctgtaatcccagcactttgggaggccaaggtgggtggatcacctgaggtcaggggttcgagaccagcctggccaacatgacgaaaccccgtctctactaaaaatacaaaatattagctgggtgtggtgacgggtgcctgtaatcccagctactcgggaggctgagacaggagaattgcttgaacccaggaggcagaggttgcagtgagccgagatggcgccactgcactccagcctggaaaacaagagcgaaactccatctcagaaaaaaataaaaaaataaaaaataccagctacgcagcctgtttattaagcttccataatgagagcttccaatccaggtgatttgtgttcctgtctcgtccatattggccccaaactccaagatcaaatacgcttctctgacttcaaagctgaaggtttccgcaggtccgtacccccgtccgaggactgcctccaactggagctgttttcccagtcggctgcaaaggccctgcgctgtgttcaccaagcgtggggctccctctcagctgagcagatggcaaaggggcaaatgtaaggtagattctgtttgtttatttgtggcaaatagctctgaaggaccagcccttttttcctctcatctctggcaaatcattcagttctgaaaaagttccttggccagcaagccagccggtaggaggagggcggagaaaaccagaaaggggaagaaactccttcctcatctccacctcaaaaacaccaagctttgttttgggattccagtgagtttgtatccctcactcttggaaattaaaccggtagaaaaatccagaaaaacttgggcagaggtcaaaaattgttaaatcgtggccaacggggtcagtgttttctttcaagcaggggccacactgagggaagatttaaaaaccaacaataacaaaccgtggaacacctacgaactgtgaaacacaccgagaagagaaaactgggtacataatggatttttctaaaatggggtaggattttctaaaaagggctccgcagaggagaattctcacaagggttgcctccgtcatcaacatgccaggcaagtgcatggaggatggtgggcagcaagtatttctctttattttttatttttgagacggagtctcgctctgtggcccaggctggagtgcagcggcacagtctcggctcactgtaacctccgcctcccgggttcaagcaattctcctgcctcagcctcccgagtagctgggactacaggcgcccgccaccacgcccggctaatttttgtatttttggtagagacgaggtttcaccatgttggccaggctggtctccaactcctgacctcaggtgatccactcgcctcggcgtcctaaagcagtgggattccaagtgtgagccactgtgccctgcccccaagtggatcttaaaaacaaccctggggaatagataagagtttcccccatcctggctaacatggtgaaaccccgtctctactaaaaatacgaaaaaaattagccgggcgtggtggcgggcgcctgtagtcccacctacttgggaggctgaggcaggagaatggcgtgaacccgggaggcagagcttgccgtgagccgagatcgtgccactgcactccagcctgggcgagagagtgactccgtctcaaaaaaaaaaaaaaaaaaagtgtttcccagatgacagagttagatgttaaacatcacaaagtcggtggatattaaatgtatgattgttttcatatctttagccccaaaataataaatgttcagtggagatgtccaaagccaggcccaatgcctggggagcttccactgcttatctctctcctgaatccagagtattctgcccttcacagaagtgctgatcgttcagagataacccaccaatcaggtgtgcctttagggttaggccagcaaaccacaggctgccagcaaaccacaggctggaaactgggaatgtccttggggtcctggggccttggctgttctcaccctttcggccacaaaaaggctctttcttggctgccagagaccctccctggggtagagagggagaaggagagggaaagggagagagagaaagtgagttgggggagctgggtaactaaaagacaaggagttgatgtattctaggcgcttgaaagttcagaagactatctcttttttttttttgagatggagtctcgctctgttgcccaggctggagggcagtggcgcgatccctgctcactgcaagctccgcctcccggggatccctgctcactgcaagctccgcctcccgggttcaagcgattctcctgcctcagcctcctgagtagctgggattacaggcatctgctatcgcacccagctaatttttgcatttttagtagagatggggtttcaccatgttggccaggatggtcttgatctcttgacctcgtgatccgcccgcctaggcctcccaaagtgctgggataacaggcgtgagccaccacacccggccaaaggctgtctcttctaattactgaggttttagaaccattttcctcaactctccctcttgcaagagtccgtagtgggtgtgctcaagacctgagcttgagttatcatgcccactaacgccctggctgagaagttcccaccaaaagacagcggtgacatttgcttcccaaaagtcccaaaaccacgctccccgttagcctcggcgcctcacagggaaaaagaatcggctctggagggacgaccccccgcagcgggcgactgtaccgctgacgggctcggccagcacatctccgcatcgctgggcctcagtgtcctcacctggaaaatgggggtgatcacgccaacgtcacagagtccttgggagaatgaaatgaggcaatgcctagaaggtgtctccactgcagtccctggcacggggaggttgcagccttctgtggcagccttggctggttatcacgcagttcacagcttcagggccagagcacagatcctggttcagccacgtatcagcagcacaaccgggaaagccagtcggccccacggtgcgtcctccaggggccgcatgaggagagacgatacacgccagcactcagggcccagcacgggccccccactcagtgaaaagcatcctctcactcttaggcttgtcatgatcatgcaccggcagcgtccccctcggttacgaaccccattctagatgacaaagcactagtaacccacgtacagtagtggctgaaaaaccgtcacaggaatcatcctcagggccttcgaggtcacaagcgtgacggggacgcgcaggtgctgatgtgagatggactctgtatgtgaatgaggctaaaagactcactttcctaaatattatgggcagacataatggggctacacaggcattgagctgattttacacagttatggacaatgggccctctgtacccacaggttctacatccacggattcgactaaccccaaatcaaaaatattcagggctcggcgtggtggctcacacctgtaatcccagcaatgcaggaggccgaggtgggcggatcacttgaggccaggagttcgagaccagcctggccaacaaggtgaaaccccatctcaactaaaaatacaaaaattagccgggagtggtggcacgtgcctgtaatccaagccactcgggaggctgaggcaggggaactgcttgaacgcaggaggcaggggttgcagtgagccgagatcctgccactgcactccggcctgggcaacagggtgaggctccctctcaaaaaaaaaaaaaaaaaaaaaagggccaggcatggtggctcacgcctgtaatcctagcactttgggaggccgaggcgagctgactgtcttgagctcaggagtttgagaccagtctgggcaacacggtgaaactccgtctctactgaaatacaaaaaaaaaaaaaaaaaattagctggatgtggcagcgtgcgcctgtactcccagctactcgggaggctgaggcaggagaattgcttaaacccgggaggcggaggttgcagtgagcagagatggcaccacagcactccagcctgggtgacagagactctctctcaaaaacaaaacaaaacaaaaaaatcagtaaaaagaattttttaaaaaaatgtaaaaatacaaataaaaaataaaatacaacacagcataacgactatttacatagcaatgtattagatgtattaggtattactcataatacattgtattaggaattataagtaatctagaggtaatttacagtacacaggattaccccatttaccctggtgtgatgatcacacgttgtatgcctgtatcaaaatatctcacgtccaccataaatatgtacaccataaaaattaaacaataaagaaagaaaacaaaggaaacaaaacagaaaaaaaagaagaaaataataaagtaaattggagatgtacacgggttatatgtaaatgctattttatatcagcaactttggcatcacgggatctgggtactgaggggtaggagcggccctgggaccacctgcccacaggcactgagggacggctgtggaactgtacagggcccggccctgcgctggggacctagcggtgaacaagcagcctgggaaaggaatgtttaaaagctcccgggcgactgaagatcagccaggggtgaaaaccatcactcggtgcttcacggaacaaacgcttgaggcaaaacctaagacagctgggtcccaacgcggggcctcaccccggcccgtcccgccccagcgctcggaggctgagagcagcattctcagatggtactaaatccacatcccgggacacgaggaaacagcagggccagggcacggcctcctcctctccccgcggcctcctcctctcccccctgcctcctcctctccccgcggcctcctcctctccccctgcctcctcctctcccccctgcctcctcctctcccccctgcctcctcctctcccccctgcctcctcctctcccccctgcctcctcctctccccgcgggctcctcctctccccccgggctcctcctctccccccgggctcctcctctcccccctgcctcctcctctccccctgcctcctcctctccccgcggcctcctcctctccccccggcctcctcctctccccgtggcctcctcctctcccccctgcctcctcctctccccgctgcctcctcctctccccgcggcctcctcctctccccgcggcctcctcctctcccccctgcctcctcctctccccgctgcctcctcctctccccgcggcctcctcctctccccgcggcctcctcctctcccccctgcctcctcctctccccgctgcctcctcctctccccgcggcctcctcctctccccgcggcctcctcctctcccccctgcctcctcctctccccgctgcctcctcctctccccgcggcctcctcctctccccgtggcctcctcctctcccccctgcctcctcctctccccgctgcctcctcctctccccgcggcctcctcctctccccgctgcctcctcctctcccccctgcctcctcctctccccgcggcctcctcctctcccccctgcctcctcctctccccgctgcctcctcctctccccgcggcctcctcctctcccccctgcctcctcctctccccgcggcctcctcctctcccccctgcctcctcctctccccgttgcctcctcctctccccgtggcctcctcctctcccccctgcctcctcctctccctgctgcctcctcctctccccgcgggcctcctctgttaggacccacctccctgcctcagtctggaaaggggcagccacgtgaggacctctgagaccctggagagccactgggctcagcctggagcagtgggggctggggtgggaagacgccatgcattgttcagccccagcatctgcctgggcaccttctggtaacagtcatttggccagcagcttctcgggggctaacggtcaatgccagaagcaattagccccaggtcctggtcctccttggagccaaaacaattagtaggctgaagacagcctgatgcttaagaaatcacttttttaaaaaggaaaaaaagattgcttaaaagaagccccttaactctgaaggcagttccatccaccttacaaattcggtgccctgtgaatacacatccatgggtcacagcagggaatctttttaactagaaaaagagcaggagaaggaattcagatcaacatcacggactgcagcagtaaagctggtgcctgttcgcccctttcccctccaggcaggaaagaatcaaggaagaatttcagaatctttttatacaagaaagggattcggtgggggaagggagtgggtacagagatgaagaactttagggtttgctatttcaagcttaaaataaatcccaacgagaaaggatccgaaggcttggttttatttttaagatcttatccaaggcagggaactatatctggttttcaggggtgtgtggggtgcaaacggccgggccagcacagtcatttcatcccctgtcgattccccaaaagcaaaaccaaagctcagcatgtgcttctagaactttctatatctggtgttcaggggtgggtggggtgcaaacggccaggccagcacagtcatttcatcccccgtccgttccccaaaagcaaagccagagctcggcatgtgcttctagaattttacaatcttgaattacggcttcaaaataactcacattccactataaggaggctcagaggatgccaccgagtggacggacgtgagcaggaccacagagacaacccagtgggacacgcaacactgttcccaagatgttagcaggggaaagagtcggacgaaatggcgaagtgtttggcacaaagaagaccaacaaatgacacaccaagccagtaaagacacctccgtaagaaagacacattcctccccaaatctactttaggagctactgctgtcaactcttgactttctggaagtctaactagtacaaggtccaatcctcaatcgcttatgaaacaaaatcagaaaaaaccgggtagaaccctagtactccgcattataaaaagcacttccggccgggcacggtggctcacgcctgtaatcccagcactttgggaggccgaggctggcagatcttttgaggttagaagttcgaaaccagcctggccaacatggtgaaaccctgtctctacttaaaaaaaaaaaaaaaaaaaaaaaaaaaagctgggcgtggtagcgggcgcctgtaagcccagctacttgggaggctgaggcacgagaattgcttgaacccgggagacagaggttgcagtgagttgagatcacaccactgcactccaacctgagtgacagagtgagactccatctcgaaaaaaaaaaaaaagactgaacagcttctctttagaactttctaacacacccccaggtggaggccagtgttgcaacgatcgcacgagggaccagagggtaattctgcagcctgatctctctgttgagatgctcacgctctctttttgcagacatgatgtggttaaagccagggtctttctcaatcaatacattttaaaaatgcgagctgggggcgggggcgggggttgggggcgggagggtctgtcagctgtgtggagacaaacctcctgatccaggcgctctctggcagaggcgggcaagccccacttccatgtatggaagtgaatgaaagcagtaaaacctcaggcatgagtctgggcagggctgggggtgggggccggcattcctcccagcagggccagccccagaggggcgggcagcaggaaccttcacctggggtcccgtgggtatttccctgggagagccacaggggcagagaggacgggaggcaggaaagcaatgagctcggcacactcagtagacggagggcacccgggaaggggagctcagcctccccgagaatgcaccagagcctgagtcctggaaaccagggccacgcagctcccgcctgccctgacctcagtcccctggaatgcagaattctccacggtcagccatccatcaccaccgctccctcatggccagcgctgaaagaaggggcgtttccgtttttgtggggggcggtggtggttgtggtttttgtggtctgagaaactcatgacagttacccacctcctgccaggacaaggccacaggaggttgcagaaaattcaggtcacactgtgggggggctggggtcagagagaccaaggttggaacccggcaggtaccacggacggtcacactgtgggggggctggggtcagacagaccaaggttggaacccggcaggtaccacggacggtcacactgtgggggggctggggtcagacagaccaaggttggaacccggcaggtaccacggacggtcacactgtgggggggctggggtcagacagaccaaggttggaacccggcaggtaccacggacggtcacactgtgggggggctggggtcagacagaccaaggttggaacccggcaggtaccacggacggtcacactgtgggggggctggggtcagacagaccaaggttggaacccggcaggtaccacggacggtcacactgtgggggggctggagtcagagagaccaaggttggaacccggcaggtaccacggacggtcacactgtgggggggctggggtcagacagaccaaggttggaacccggcaggtaccacggacggtcacactgtgggggggctggagtcagacagaccaaggttggaacccggcaggtaccacggacggtcacactgtggggggggctggagtcagacagaccaaggttggaacccggcaggtaccacggacggtcacactgtgggggggctggagtcagacagaccaaggttggaacccggcaggtaccacggacgacaggttcctgctgcccatccctctgggaggaatgacggccagcagagccaggacccacttctccgtcctggaagacgcaatgagataatacatgaaaagcagtaacaaggtggtcctagaggggtcctaggctaccccgtgttaaagatgagagccatgaagaccacttcaaggtggtccctggaatccagtgaggggctcagtccacagaagccatgactgatgatcattatcatggaaccctccagctcagggaatgtctgagtagctccctgaagtccaaacggaagactatgacccttgggaggccgaggcgggcggatcacctgaggtcaggagtttgagaccagcctggccaacatggtgaaaccccatctctaccaaaaatagaaaaattagccaggcatggtggctcacgcctgtaatcccagctacttgggaggctgaggcaggagaatcgcttgaacccaggaggcggaggttgcagtgagctgagatcgcgccactgcactccagcctgggagacagagcgagactccgtctcaaaaaaagaaaagactatgacccccctcccaccacaagcaggacgaggcacctcggatgccccacaccccctgtccctgaggacgaactctaaggaacaggagaaacatttttataacttcctcgcgcccagcataaacctgttaggattctccagccaggcccaaccttataaacctatgtcaagttcaaactatactctcaacagttgtacttatcactccacagagaattcacactcccttctctaaggagtccagagtgagacagaggctcgtatctgtcatcccagaacttggattgcttgagcccaggagttcaagaccagcctgggcaacatagtgagacccccatctctaacaaaaatttaaaaattatctgggcgtggtgacacgcgcctgtagtcccagctactcaggaggctggggtgggaggattgcttgagcccagaggttgaggctgcagtgggccatgaccgtgccactgcaccccagcctgcgtgacgggtgcgggaggatgatggtgcatgcacgtggtcgtgtggctccgtgctgcggctcctctctgtctagcaaagtgcaactctcaactccaaggagacctatgctgggtttcacaaagtacttgaaagcacaccaagatgattcttgaataactggcattagacacgattctcactcctggccaggcgccgtggctcatgcctgtcatccaagcactttgggaggccgaggtgggcggatcacctgaggtcaggagttcgagaccagcctggccaacatggtgaacttccatctctactaaaaatacaaaaaaacttagccaggtgtggtggtgcacgtctgtagtcccagctactcaagaggctgaagcaggagaatcccttgaatcttgaaggtggaggttgcagtgagccgagatcgcaccattgcactccagccttggtgacagagcaagactccatctccaaaaaaaagaaacgcttcccgctcctaagttttgggatacctaaattctctctcgagtcaagtggcaggtctgacccggcagcctcccttccaaattctccaggctcagggcaagcacgtgtccggggctgtcctgcaccaactttttgtttttctcctactcaggcatattcgacctccctgctcaggttccagtgacttcctcagagcaacagggctgattcccacgaccccaggccccagggccgagtgccaggtgctcaggtcgcagctgtccctcaacaccactcgggaagggggctaactgcccggacgggccccaggatcacgagcctcctctccttccctgatggcccaacaggaaaaagtactgtggctgccaagccatctggatggaatggaatggctctctaccagttaggggccgcatcggcctagactcccagattgaagcacctgaccttctgtaaattcctttctttacattgcacatatttcagcgctggtattccccctcttaagagctctgagctgttgtccagtgaggtaacatgtttgttttttcagccctgggttacagccactcgaggctttccacataggaggtctgccccgcgtcccgggcctgaccccagcccttccacaggaaaacaactctgctgtcaggaatgagcccccgcgacggggagagtggtcttttctagaggctgggatatgtaaactcacacgggaaagatgggcctgtggtatttccctcttttccagcatgctcatctctttcttttttttttttttttttttcctgagacagagtctcgctctgtcacccaggctggagtgcagtgctatgttctcagctcactgcaacctccgcctcccgggttcaagcgattctcctgcctcagcctcccgagtagctgggattacaggcatgcgccaccacaccctgctaattttttattttttttagtagagatggggtttcaccatcttggccaggctggtctcgaactcctgacctcaggtgatccacccgcctcggcctcccgaagtgctgggattacaggcatgagacactgtgcctggcctcatctcttctctaagagcaaaacttggcaaagtctgacagacactggttggacttcttttaaaggctaccaggaaaactgccaagaaatatgactggcccagccagacgcggtggctcacgcctgtaatcccagcacctcgggaggccggacgcggtggctcacgcctgtaatcccagcacctcgggaggccgaggcgggcggatcacaaggtcaggagattgagaccatcctggctaacacggtgaaaccctgtctctactaaaaaaaaatacaaaaaaaattagccgggcgtggtggcgggcgcctgtagtcccagcaactcgggaggctgaggcaggagaatggcgtgaacccgggaggcggagcttgcagtgagccgagattgtgccactgcactccagcctgggcgacagagcgagactccatctcaaaaaaaaaaaagagagagagagagaaatatgactggcccagccatacagaggctgagaatctggaggctggtctgccatctgaccgcctcctccctgagcctcagtttccctgcctgtcaaagaagactgtggccacataatccccctgtcctttccagggtatcattcagtgactgcattgttcaatattttgaaataagggcatttaattatgatgacagcaccaataaacactgagactcacctttctgcttggaattccaaacctcttcccaccggaatcccgccaagccttcaactctccatccaaaccattcattctttctttcaataaacacggtgccaagtatttactaataagaggtgtcgaacgtgttaagtaagaaggacacaaggaggaaagacagtttctctgccctcaggaaaccatcgggtctcgtggaacagaacagtggtcaccgtcttctggccttttcctctgtgcccagcactatgttcagggctttttatttttatttatttattttgagacagagattctctcttgtcacccaggctggagtgcaacggcacaacctcagctcactgcaacctccacctcccgggttcccgccattctcctgcctcagcctcccaagtagctgggactacaggcgcccgccaccacgtccggctaattttttgtatttttagtagcaatggggtttcaccgtgttagccaggatggtctcgatctccagacctcaggtgatccgtccacctcagcctcccaaagtgctgggattacaggcgtgagccaccgcgcctggccaagagctttttatatcagtcatcgtcttaaacctccaccgcaacctgacaaggtggacgctgctatcgttcccactttacagatgaggaagtggggttaaagtaacttgcccaagatctcaaagctggagagcgggaaagatggatcagaaccaggtcatccaggagagaggctggcccctccgttctcagagctcctgcgggcaactccagcccttttagaaccaataccatggtcatcacccagaaaaaactctaaatttataggtatatatatttcatgccttatctccccagcttaattataaacgcctttgaaagctgggactgagtcatttatttctctgcatcctgacactgcctgaggccagtgagatgctcagaaaacatgtgaccagcaggggcctggcggagctgagacaaggcaacaacgtgcaaaggtgatttgtgtaatatgagcacatacgatgaaaacatctggcttgagagcgtcctcatccctgtcaccacccccctcccccaacactacgccgtgtggaaaacacctagaggaacttcctctacttcacacacagaagccaggaaccccccgggatcttctctgcactctaaggaagctgatagaaaatgcatttctgggccgggcgcaggggctcacttcggccatcccagcactttgggaggccaaagcgggtggatcatgaggtcaggagttcaagaccagcctggccaagatggcgaaacaccgtctctactaaaaatacaaaaattacctgagcgtggtggtgcacgcctgtagtcccagctactcgggaggctgaggcaggagaactgcttgaacacgggaggtgtaggttgcagtgagccaagatcaagccactgcactccagcctgggcgacagagcaagactccatctcaaaaaaaaaaaaaagcatttctgcaacccggcccagcagaaggttctttggtttgagtgtggcctccttggtcaaaagcacctgtctcctatcccgtcaaggaggtcaaacctccttggtacaaaaagcacctgtttcctgtcctgtggcatgtctggaacccagactctctttctcagtccaagcccagacccgagagaggcagctctcaccttgcaaacagacccccgcagtcagcttctcagtcttcacacagaaatcacacctccacgtcagcatcgcccagaatgtatgttcctggggctctgccaagggaacctctgttttcctcacagaacgtgaaaatgtttccacggagcacgggcagcccccatcactcatcaggttccaaacatgcatcctctcgctccatcctatacttaggcgcctcggcaggatcaaatgaaccctctccgtctcaactttccccttccttcccacacggctatttatatctggaatatctctctgtcttaatccactggactaccctccccctcgtttgaaaaggtcacttgcacattcttctttccagaaggcttttcttgcaggaggtggctgccagcttgtcccttccccggtgcctctgcccaacaagacatgacggtgagcaaggttactcatcttccgaaaatgctaacgtgctgactggggctaaccctacgctaaagcaaagccttcaaaaactggaagcagcagggcgcggtggctcgcacctgtcatcccagtgcctgggaaggctgaaacaggaggatcgcttgaggccaggcgttcaaaaccagcccgggcaacatagcaggactccaactctacaaaaattaatcttaaaaattagctcactcctatcatcccagcactttgggaggccgaagcgggtggatcacgaggtcaggagttcgagaccagcctggccaacatggtgaaaccccatctgtactaaaaatacaaaaattagccaggcgtggtggcgtgcgcctgtagtcccagctactcaggaggctgaggcaggagaatcaccgaggcggaggtagaagtgagcccagattgtgccactgaactccagcacaggcgacagagcgagactccctctcaaaaaataaaataaaataaaaattagctggggaggtggtgagctcctgtagtctcagcttctcagggggctgaggtgggaggatcgcttgagcccaggaggtcagggctgcagtgagtcatgatcacactactgtgctccagcctgggtgacagcctgagacttgtctttaaaaaagaaacacacacacacacatacacacacacacacacgatacgagttctttcatcttgcaagaaagaatcatgcggatgtgcgcggagccgagggaccatggtggccgcggtgtggtcactgatgaggttcctcatcacgggcggtgtggctggaggcgcgtcgacctgatgtatggccaggagctgctggggcccagcaacaagagccgagcgcccctacggaaggctggagaggtggttccccgccacgtaccagttcagccagtacgtgtgtcagcagacaggcctgcagataccccagctcccagcccctccaaagccttcctttcccctccatgactcctggaatgcaggtatcatcacagctctgtaggcccctcccaggcccgcgacactccaaggagggctgggagtacgtggagtcgcgcagaggctgcctgccccggccagagcgggagaacgggcagggcgccactggcctgaggactccagactgggaccccactcccagggaagctcccagcctcaccggcccaataaaggacttcagaagtgagaaaaaaaaaaaaggtgaaataggccaggcgcagtggctcacacctgtaatcccagcactttcggaggctgaggcgggcagattacttgaggtcaggagttcaagaccagcctggccaacatggtgaacccctttctactaaaatacaaaaattagttaggtgtggtggcaggcgcctgtgatcccagctactccagaggttgaggcaggagaatcatttaaacccgggaggtgaaggttgcagtgatcttagatcgcgccaccacactccagcctggggaacaagagcgagactctgtataaaaaaaaaaaaaacagggctgggtgtggtggctcatgcctgtaatcccagcactttgggaggctgaggcgggtggattacttgaggtcaggagttccagaccagccgggccaacacaatgaaaccctgtctctactaaaaatacaaaattagctgggcatggtggcaggtgcctgtaatcacagctactcgggacactgaggcaggagaatcgcttgaacccggggggcagaggttgcggtcagccgagattgcaccactgcactccagcctgggagacagagcgagactccatctttaaaaaaaaaatggaataatcaagtgattacatttggaacatgtgggaatcagaaacccaccacccacggaggccaccacctaacacaacagtaagcaatgggggtatttacttcaatcttcctttttatgtatctgtttaatacagtgccatctataatcatggtatcatgtataatttgggatctcgcttttctgaatgcagtatgtgaagtataggtctacagctctatattccagcaaaaacttttaaccgccaacccttttttttgtgacagggtctccttctgtcactcaggctggggtgcagtggcaggatcacggctcactgcagcctcaacctcccaggctcaagtgatcctcctgcctcagcctcctgaatagctgggactacaggtgtgcaccaacatgcagggccaattttttaagtttttggagagacaggatctccccatgttgtccaggctggacacaagtccctgggctcaagcgatgcttccacctcagcatcctgagtagctgaactacaggcacacaccaccatgcctggctaatcattttatttttagcagaaacaaggtcttgctatattgcccaggctggcctcaaactcctgggctcgagtgatcctctcaccttggcctcccaaagcactgggattacaggtgtgagccaccacgcctggccaattaactcgatttttttttttttttgagatggtgtctcgctctgccacccaggctggagtgcagtggcgcaatctcggctcactgcaagctccgcctcccaggttcaagtgattctcctgcctcagctcctgagtagctgggactacaggcacccgccaccacgcccggctaattttttctatttttagtagagacggggtttcaccgtgttcgccaggatagtctcgatctcctgacctcgtgatctgcctgcctcggcctcccaaagtgctgggattacagccgtgagccaccgtgcctggccaattaactcgatttttaatagctattcaggctgggcacagtggctcatgcctgtaatcccagcactttgggaggctgaggcaggcggatcacctgaggtcagaagttcctgaccagcctggccaacacgacaaaagcccttctctgctaaaaatacaaaaattagccgggtgtggtggcgcgtgcctgccacttgggaggctgaggcgggagaatcgcttgaacccgggaggcagaggttgcagtgagccgagatcatgccattgcactccagcctgggcgacagagtgagactccgtctcaagaaaaaaaaaaaagaaaaagaaatagctgttcaacaagacagtaagtattgtaatttacttaacccttccatgattgttaacattcagaggatttccagggtctcactaggatatacagctgtaaggaatctcttcaggagggcaaggtaaaatgaggtaagcatcttaacagttttgtcctaacctacaggatgtacatttcatctgcatttatgactaattcagatcatattctcacttctaaactgacattaattccccttcccttcttaaatcaagtcctcccttagggctcactgaatctttgaaaagtttgcctttcataatttctactatctatttatttaattaacattcccatagcaaccctttgacttttcttaagcaacttgcttacatgaacctgcaaccaaatgaattataaattttctcagtggcctcataaagaagaaaataaggaacattagctgggtgcagtggctcacacctgtaatcccaacactttgccaggtggaggcgggtggatcacctgaggtcaggagttcaagaccttcctgaccaacatggtgaaacctcgtttctaccaagaacacaaaaattagccaggcgtggtggcgcgtgcctgtaatcccagctactcaggaggctgaggcaggagaatcacttgaacccgggaggtggagctgcagtgagccgagatcgcgccactgcactccagcctgggcaacaaagtgagattctgtctcaagaaaagaagaaaagaaggaacattcaggaaaacgggggagagttgtgtgtaatagtaggtgagaagacttttgacatcatatttgtacacttttctcaaagcaatagatacattcctgagacactgcaggtgaattttcctaagcagaggcaatcacaggttgaacacctcttaggagctcacaatctgaaacaactaggcatattgcctaacaaaacgaaggtccttctgtgataaaaagaggattcccagccgggcacggtgactcacgcctgtaatcccaagactttgggaggtggaagcaggtggatcacttgagtccaggagttcgagaccagcctggacaacacggtaaaaccccgtctctaccaaaaatacaaaaattagccagtctcataaccccatctcaaaataaataaataaatattagattttaaaaatgtgaattgtccctgaatttatctatttcataactttggatttaaggtgaggtgggtttttaaaaatacagcaaccttcagtaagtaaaaaaatctatattaaatacaagttgcctaatactagtcccccacaaaagccacagcataatagaagtgcccggcacggagaaggcttttgtccccatatacatctgaatgcgcttggaagcggagactgatggcctcagagaatgagcctctcagcttatccaaacggcagagcccagcggcgggagtttcacagacaccatcttctcactgctttccatcagtcctagaggggcccctctctaaggacggggaagcggctttcaaaggcctcctttcgcctgttgtacacagggagcacatcagcctgagacatttcccatctaaggagagcggtggtttgagggattctgttccttgtctctaactgtgttgggttcattatcaaggcagaaatcatacaaggttatcagacaggcacacactgacacttttagcctctacccacctgagacagaaaaagcagcacctgtcaggttagccgaggatataaccaagacccatttaaaaggcttgatttaaaaaaaaaaaaaggtataggtactgggacggacacacacacacacacacacacacacccctttcattttatttgaaattttttttttaacatactgcccttccagaaaataacagttaatttaaaatgctatatccgggctaggcgcagtggctcacgtatgtaatcccagcacattgggaggccaaggcaggtggatcgcttgaggccaggagttcgagaccagcttgggcaaaatagtgaaaccctcctctacaaaaaataaaaacatcagtccggtgtggtgggacacacctgcagttcccactactcagggggctgaggtgggaggatcgcttgaaaccaggtggcggaggttgcagtgagccaagatcgcaccactgcactccaccctgggtgacagaacaagactctgtctcagggaaaaaaggacaaaaaggaaatttttttttttaaaatgctaaattgatttgcgcaaaaaaccatttaagcatatgtattttcatatgcagtatatgcctattctttttctggaaaaacataccagacactactaacagtgatgttatctttggaaagaggattattgttacagttaataaataaaatgctgggccgggcgcggtggctcacgcctgtcatcccagcactttgggaggccgaggagggcagatcacgaggtcaggagatcgagaccatcgtggctaacgtggtgaaaccccgtctctactaaaaatacaaaaaatcagccgggcgtggtggcgggcgcctgtaatcccagcactttgggaggctgaggcaggagaatggcgtgaacccgggaggcggagcttgcagtgagccgagatcgcgccactgcactccagcctgggcgacagagcaagactccgtctcaaaaacaaaaacaaaaaatgctggctctctcttgcagatggaaaacagtgaacacagagaaacatggcgtatgaagtcatgctgagcagaggaatataaatggctttctaatgtaaacagtcagcaggaaagccataatttgtgctgcatgtacagagacagataaatccctgtctcctcatgaacacacaccgtgttttgttgtaaggatctctatttgcctgaactgttggctcaggggcagaacagatccagaggatctcagaaaaaatgtcactaatttcttcacaagaaagaagggcttcaaaaagcgcttcagaactagagtgttccaccccagtctctgcaaattaatactttccgcaaatccaaatgaaagagaatatgttcacgtggtattaagtagcattttattcttaagaacatttgtaaaaagcttaaagcaacgcatccaagggttgaagccgggactttctgcaaatttaggaaactgatttccccccaggaaaatgtctgaaggcatttacttccaattcaccctcacgcctacatctgaaatgtcagaatccttaggtgccaaactgcaatgtatattacagatttgtgtgtaactttaggtggtcaaagacacttgtgtaagaaaagaaacctatttcaaagtaaggtaaaattcatgaaataaatggactgagtcaccctaaaatattaagaaaaacatctatcagcacaaggacagtgggctgctttgcagctagtgactgtctatggataattttgaaacaaaatgccacacttaattagccagcgggcttcgcatcctgtgtgtgacggagagaatggtattaagaaaaagactccctcaggctccattaatgccctaatgagaggaggcggggagaggggtgttgggtagagggcagggcagtcaggattaccacatggccctcaggaagtacaagctctgcgccttctggacaaatgggggactctcaaccgcacactgactattgggcgtatctagccagctatttccacagggtcctctgcaggaaacaattgtacccacactccacacatgcccagcagataaagcagttctcagattacatccaagagggagaacgtgggccttaagctcacttaaccgtcatccgtgatttcgtgaccagcaacccaccgacggagggagtctcgattttcaaaaagacaaaagtgggagattctccagatggcagagagctggactcgacatcaacccttcaacagaccttccggcttactttagttatcacacacacttaggaaaagaagggatctgttagaagcaagcatgcattcaccaaacacacgtcatttcagactatctttccttgaaaactatcaataggaactatctaagtgatagcaagctgtctgtgagggcctcctacaataaacatgctgatcacaccgaggagtgtgggctgaatcataatccaatcagggcaagtttggaatcggctggatttgaagacggctgagcaactgactaacagactcctcctagcctggagaaggtgtctagcggcataaccccccaactctatccccagactcaggctaatcaacatttttatcaactgcttgtataaacaacagtctagcagggaccacataacacagagctaagaaggggctttgatgactgtaggtgatcacatcagcctgtagtcccagctactcgggaggccgaggcaggagaatggtgtgacttcaacagacagggcacagtgactcacacctataatcccagcactttgggaggccgaggtggggaaaacatgaagtcaggagttcgagaccagcctgaccaacatggtggaaccctgtctctactaaaaatacaaacaattagctgggtgtggtggcgggcacctgtagtcccagctactcgagaggctgaggcaagagaatcacttgaacctgggaggcagaggttgcagtgagctgagatggcaccactgcactccagcttgggcaacaggagcaaaattctgtctcaaaaaaaaaaaaaagaaaagaaaagtgaatgcaatgagatctcgcgacatggtaacagaagtctacataacatctacaacaagcttgtccaacccacagcacgcggacacatgtggcccaggacagctttgaatggggcccaacacaaatttgtaaactttcttaaaacattatgagatttttttgctatttgctttttttttagctcatcagctatcactagtgttgtcagcatttttttttcttttgagatggagtttcgctcttgttacccaggccggagcgcagtggcacgaatttggctcaccgcaacctccgcttccagggttcaaatgattctcctgcctcagcctcccgagtagttgggattgcaggcatgcgccaccacgcccggctaattttgtatttttagtagagacggggtttctccatgttggtcaggctggtctcaaactcctgacctcaggggatccgtcgacttcagcctcccaaagtgctgggaatacagacatgagccaccacgcccggctggtgttcgcatattttatgtgtggcccaagacaattcttcttccaacgtggcccagggaggccaaaaaattgggcaacaaaggaggtagggcagccagctgccctctgtgcctggacagaccacactggagtctgcattcaggtggggggatgactgttgggggggtggggcagacaatcttggagggtgcttggatctgaatggcctgggtgggggggaagggtgaacccacatcacaggagaaatgctccaaggaccaggggactctccctggggagagagaagagttgtctgcagttcttcacggcccagcggtcccctgggagaggacggctgaggtcagaatggacttcctcaggagatggtgtgttggggtcactggaaacaccccacacagagacggtgaccgtaggggccactctccctcagtaatacaccctgatttttcttgacaagcccccccacagcccccaggcctgaggctcagtccacctggcttgggaccccagcctccagctacacaggtgtggacacaactcaggcttggccctttggtatttacacatcccggccacagtgaccagttatgggatcaagggcgaccatgccggactcctgctgctgggagtctgggaggacaggaagcaggctcagaactgccgatggtcctcaggccactaggagatgaggaacagcctgccagaggccagggcgcagagacaggcggggcggggagatgggcaaggacctgccccaggacggcatctgtgccacccgggcctaaagctgacctatatctggacctctcacccacaggaaactcagacccttctgaacccaggagttgatattctacacacctagataaggcagaaaacagggctcagaaaagttcaggaatgtggcaaggaggcagacccagggacaggaccaagttaaatggataagaacaacaaataaattgcaaggaaaagcagggaagggaaactataggttaaaagaggcttaagggatacagctaccaaatgtaatgggcaaattttatttggattcaaacaaaccaactgtcatcccagcactttgggaggccgaggcaggtggatcacgaggtcaggagatcaagaccatcctggctaatatggtgaaaccccatctctactaaaaataccaaaaaattagccaggcatggtggcgggcacctgtagtcccagctacttgggaggctgaggcaggagaatggtgtgaacccaggaggcggagcttgcagcaagctgagatcgcgccactgtactctagcccaggcgacagagcgagactccgtctcaaaaaaaaaaaaaaattaggagacaatcaggaaaatgtgaatactaactggatatttgctgaaactaaagaactgatggatttcttgggtgtgatattgtggttatgttttttaagggttacttagtgaaatgcttatgaaggaaatgagatgacggctgggactatcttcaagatcattgaggaggtgggggtgggggcagtaggtgtccttgagttgatgactgttgaatgtgggtggatatgtggggattcactgaactgctttctctacctgcatgatatttaaagtttcccaaaataaataatattaagagacatatgcacagaccagtatctccccctggcctctcccagctcaaaagagggtgcgggatccattcagtaaaaccgagcacctgattagtcaaagagatgatctagaattacacccatatgcaaagatacacagatgcagcccggcgtggtggtgcacacctgcattcccagctactcgggaggctgaggtgggaggactgcctgggcccaggtcaaagctgcagtgagccctgactgtgccactgcactctagcctgggcaacacagcaagagctctctcacacaaacaagcaaacaatcaaagacacagatgtcatcaaatcaacaactgacagacaattattgtcctagaaggaaaatgaagagaggccaggcatggtggctcacgcctgtaatcccagcactctgagaggctgaggcaggcggatcgcttgaggtcaggagttcaagaccagcctcgtcaagatagtgaaaccctgtctttattaaaaagacaaaatgagccaggcgtggtggcgggcacctgtaatcccagctactcaggaggctgaggcaggagtatcgcttgaacctaagaggcagaggtcacagtgagctgagatcgtaccactgcactccagcctgggagacagagagagacacggtctcaaaaaaaagaaagaaagaaagaaaaagaaaagaaaagaaagaaaagaagcaaaaaaatgaagagaaaccaggttctgtgatagtctctagatacaaataaataactaggtgctttggaatgggggaggggtacaaagaggtaaaaaggctgaattcctctctcttataatccaaataaccataaaatgtggaatgaataccgaagcgcctggtaaacatttaaacggcacgtgctatgcaccaggcaccatcctaagtacttgtcaaatattatgtcattcaatccttaacaaccaccctaagaggctggtaccatcatctccattttactcaccaggaaactagagacacagaaattccagaactggccccaaagtcacacccccgggaaacagccaagtttccaacccgggaaacctggatctggatttccagtctatattcttcgtctactatggaacacactttaaatattcacataccataatggagtatttttgaaagatcacgggtaaaaacaatttttacaattgcagtcaagaacatgcccagagctggaaaacgctgcactcacagctacattcacgcctattcggggctccggcggtcacactgcgatttttccctattgcacgtggtcccgcccaatcttcagatttcacatcaaaacctgaaaaatgagtaacagatgaggcagctgtgctgtgagccaccacgatcaaaagaaaaccgtcttgacctgatcacgtttaacgggaggaaaagcagcgccttctgattttaaacagattaaatccatccagatttttatcccaggcatattgaccaaaaaaagacaaattaaaaaaaaatgtggaactgatgcatctggatgaaattctcccaggaaaacaaagagaaagccctatccctaggacagcagaactcaccacaccctgtttggtgactgttcgacaacgatatgagataaaaccgtcattcactgtagaaacagcacttgaatttacctgtaattggtgcctgtactgagacaccctggggagcagggggagaggctgacggattggacagaaggaagcgacgaagtgaagcttacgttgtttttttaaaaggactttctgatgtagttcatacaaaaatacactgtgtatctggtccaagagttatgaccggcaagccgcagaaaatttacgtttgcttttaatcacggaggccacagaacaaaactttccatgacgggtctcactcccgagtaacggcactgggcttctgcctcgtcgtggtgcagaaagcacaggtttgagatttcactggaagttggaacggcagtttctgcaaacctcataaaagggaggactgatttagtcctaggatctcggcaggacacctgaagttcaattttgtctctgaacaaaaagcactacagcagcctgcaggctttccgtaggatgaagggggagttggggggcccttcactggaggaactaaaaaaaagccaaatcattaaaaaggcccttagaaaaaaaaacaccaccatggaaaaaggcagcaagagagaagaggttctcgctctcctgccttccaagcaaccagcgaatgtttcaagccgttcaactacctctgtcttatctcagagcggtccctgcacacctagaggaagaaagccacctgaagaggcttgctgctcctcctcctccatgcggaacgtttgatgtgagtattttttaaggtacaattccgtgaacagaaaggaccaagttgaatttaagggagttcagccaagctctttcatccaacactgtgaccctgatctaataatcggtgctctttgcttcaattctccagctctaacatacttggaaaagttaaaacggtgaatatctactgattactagttgctggaagacgtaatatgtacgcattttgagttctttggaagaaagatgctagagaaatgcaaacaatgaaatattaaagcatggcatgacaggtctgcagatatgagactcttttttttttttttttttgacacggagtttcactcttattccccaggctggagtacagtggtgcgatctcggctcaatgcaacctccgcctccagggttcaagtgattctcctgcctcagcctcctcagtagctcggattacaggcatgcaccaccacacccggctaattttgtattttaagtagagacagggtttctccacattggtcaggttggtctagaactcccaacctcaggtgatccgcccacctcggcttcccacagtgctgggattacaggcgtgagccaccgcgcgtggccgagtctcttttaatagactcagatatttgacatttcaaaaatggagagtcaagctttttcctatttttgagcacagaatcacacggcaatccagttgcacaagaagctgctgggactcacccagctgtgacatccatttgctcatttagtcctctttaaaacactcattgagaaacaaaaacagaccgagcgcggtggctcacgcctgtcatcccagcactttgggaggccgaggcaggtggatcatgaggtcaggagttcaagaccatcctggctaacacggtgaaaccccgtctctactaaaaacacaaaaaattagccgggcgtgagggcgggcacctgtggtcccagctcctcgggaggctgcggcaggagaatggcgtgaaccgggaaggcggagctggcagtcagccgagatcgcgccactgcactccagcctgggtgacagagcgagactccatctcaaaaaaaaaaaagaaagtcaggattcacaaagattccaaattcatagcgattttccttgattgtcttggaatacgcataaacggtaaattcaatgcaacacagaaaactaagcaccttggtggttcacaccatgcaccactgggaattcagatcatgaagaaagaaaacacatcctggccgggcgccgcagctcacgctgtgatcccagcactttggaagccgaggcgggtggatcacctgaggtcaggagttcaagaccagcctggccaacatggtgaaaccctgtctctattaaaaatataaaaattggccagtcacggtggctcacacccgtaagcccagcactttgggaggccaaggcaggcggaccacctaaggttgggagttggagaccagccagaccaacatggtgaaaccccatctctactaaaaatacaaaattagccgggcgtggtggcacatgcgcctataatcccagctactcgggaggctgaagcagaagaattgcttgaacccagaaggcagaggtcacggtgagctgagatggtgtcattgcactccagcctgggcaacaagaacaaaactccatctcaaaaaaaatttaaaaaatacaaaacttagccaggcgtggtggctggcgcctgtaatcccagctactcgggaggctgaggcaggagaatcgcttgaacccaggaggcggaggttgcagtgagccgagatcgcgccactgctctccagcctggcagagcgagactccatctgaaaaaaaagaaaaagaaaaaaaggaaagaaaacacatcctatgccaagcctgtgctctcctggccaaaatgaaatcatgcaggaaggatcccacctagttcacaacgggacgagctggagccctggaaccctgatcactgtcaggaaaaaggaagatccccaaggggtttgttcaaccccgaccccagctgtgcacaaagcctgttttctcaaatgtgtgtgcacattacaacaccttcccaacaaaaggtaggaatattttaaaacgtagaatcagggccgggtgcggtggctcacgcctgtaatcccagcactttgggaggctgacgcgggtggatcacgaggtcaggagatcgagaccatcatggctaacacggtgaaaccccgtctctactaataatacaaaaaattagccaggggtggtgacgggcccctgtagtcccagctactcgggaggctgaggcaggagaatggcaggaacccgggaggcggagattgcggtgagcccagatcgctccactgcactccagcctgggcgacagagcgagactgcgtctcaaaaaaaaaaaaaaaaaggtagaatcaaatcagtgaccctaacttccagggcttgcctctgtgctctagctcacattccaacccgtgtcagaagacaaatcgatcagcaagagctgtggacggctactcagaggcaggcctgagctgctaactgggagatgagtaccaaaccagcaatgcctacatgtctgagcaaacccatcccgcagcattccagagctgggacgggaggcaggtccacgctagaggtggcgtttctacagctccagagatgagcaccctccatttcccacgcgaaacagcagtctttcaacctctacaccgcccagagttaagcaaacagggtcagcggaagacacacctaatagctttgggaaaccacaaaatgattgctttgtgcgtaatttctctcaagaagagtgcctgatcatctttaagttacaagggtgactgaaagggtaacttaatagtaacttaaatctttcccaggcttcgtcgatcagcagcagtctggagcgtcattggcagatagaaatacagagctcagtaagtatcagtaatatcccgggactttaaggcactgtatttgttgtttcattcttctaggtctttcttcgcagttataatctcttatggggcaattttttttatttaattttttttttccaagacggagtcttgctctgtcacccaggctggagtgccgtggcccgatctcagctcactgccaactccacctctcgggttcaagcgattctcctgcctcagcctcccgagtagctgggagtacaggtgtgtaccaccacacctggttaattttgtatttttagtagagatggggtttcaccatgttggccaggctggtcttgaactcctgacctcaagtgacccacccacctcggcctcccaaagtgctgggatgacaggcgtgagccacagtgcccggccattgtagggcaatttttttgacaccttcatcaaatccccttgtatgcttgtaaaagtcattggtttgaaaagtttaaaaatatacctcatgccgggcgcggtggctcatgcctgtaatcccagcactttgggaggctgagctgggcggatcacgaggtcgggagatcgagaccatcctggctaacacagtgaaaccccgtctctactaaaaatacaaaaaaaattagccaggcgtggtggtgggcgcctgtagtcccagctactcaggaggctgaggcaggagcatggcgtgaacccgggaggcggagcttgcagtgagccgagatcgcaccactgcactccagcctgggtgacagagcgagactccatctcaaaaaagtatatagatatatatatatagatatatggatatacctcataaccgttttacagttcagtaatgtgatagattcccaaggctcaagctatgaaatgaatgactaaacttaatgatcatttatctaaacacaataatagcatttattgagcactcaccacatgccaggcacgtgtatattatctcgcgtagcctttacacaataaggcaggtgctgttatcacaaatggaaaaggaacgtgtggtacagagatgtacagcgccttgcacaaggacacacagctaataaacggcagagcgggggcgtgaactcaagcagaaggacaaaagactctatatttttagccatgtattagactgccttattatgcagagaaaaaacaaagagattaaaaaatatattacaaatgatggaacaagaaaaagcctctcaaggaacattgctcttattactttatttttatttatttatttatttatttatttatttaatacagggtcttgctgtgttgtcctggctggagtgtagtgacacaaacatggctcactgcagcctccacctcctgggtttaagcaatcctcctgcctcagcctcccgagtagctgggaccacaggtacccaccactgtgaccagctaattgttattttttgcaaagacaatgtttcaccatgttgcccaggctggtctcaaactcctaggctcaagtgatccccccaccttggcctcccaaagtgctgaattacaggtgtgagccatcacacccggcctgctcctaactggactgttgtcctttattactaaaagactggcccaagtcctagaaacacagtcaccagtgggagcctgtcctggctggtccgggcttcttatgaagaaggcagaaaatcctaattttcaaatctgcacctttttgccatcttttcccaccttgaaagtgaatgcaaagaaaagatacagtggtgtcacagcaactgttctcttcctggctgcagtgtttggattcaaggaagagtggcagagctggagttgtaagaatgttgaggttgctaccaaatcctgtcccacccatagggccaaagggattcaagtaaattctcagccaagcttctcattgagtctgaactgaaagaaccacccagagcagccagagtgagactccacttcccctggctggagcaggctgaccagggatactggaccagggtcccctgactctgcagactttctcttcccctttgtcatgcaggaagtcctggggccacaccagagcctcacaaaactgtccagaggaagccagtggtctgcacccttggatgtcagtgcacccacactgaccatatgtttttgatcaggcatccagcccagacaaagttgagctctgcgactttaacaccaaaagagtgctcacttctatgaggctgaagtggatcccggagacggacctctccagtcttgacgagtgagtaacatactaatccaaagggaagaccaaatccccaaagtccaaatttcaccacctcctgactatcgatcacattccttctctctagaaatgtgaaaatcatctaccaacctacttattaaaacaagtctaactgccttaacttcaggattatagatttgctgatgaaattgttataaatgctctcaaagttctattaccatctaattacaatttatgcacagctatataataatgtgtgttttggaagctgaaataatatgtgttttggaagccaaaaaaattaagcttcaattacttttgtacctaccatgacaacaggcagaaacaggacaattttgtataaagaatgtttttttacatttttgtcctttttttttttggtgttttctcacagttcctgtcaaggtgagaggaaccaggcaaaatgcaggcttaacatatacggtcatccccaggttttttttaactatataaaggagaaattaataaaagaaaaaaagaaataccacacagcattttctttccccaccataatttttcaattttctttagagaaatgccagccaataactaattagaaccataccctttgttatcccaatgggaagaagtatacgcatgggcttaaagaacaaatgttaatgagaatttaaaaaaaattagcaatctggaactctggtttcccttcagtgtaaaacaaaattcccttctctagagttatttttatcattggcgaaatgacacggatagagtccatccacaagacgtgttcacccatccagtgccctcagctgggagaactccggctcttcacttgttctgatggggaaattagcatcattagctcacgggcttctaagcaccctaacttcaaatgagacaaaaactcagttacagaaaaggcatttgttccacatctctttggtttcaagggggaaaataattcctttttttttttttttgagacagagtttcgctcttgttgcccagactggggtgcaatggtgcgatctcggctcaccgcaacctccgcctcccaggttcaagcgattctcctgcctcagcctccctagtagctgggactagaggcatgcgccaccaggtctggctaattttgtatttttagtagagacggggtttctccatgttggtcaggctggtctggaactcccgacctcaggtgatccgcccacctcagccttccaaagtgctgggataacaggcatgagccaccgcacccggcaataattccttttaaaatcagcacgtagcttttgtaatttccaagagtatgtgttccataagaaggacagctggagtctttttacctggtatatatccccgagaaagatcttgagtggtttgttcacgaccaaggaaagaaactacctccttgaaaactggactggttttagagaataaagtataggatgtgagtcagaaaaactctgggccaaaaaataaaatgtttaagatgctaacgcaccagggtttgggcacgtccagcactctcaacggtattttcaaatgagagtctgccctgtgtcatccaggttctcatcatggaggaatcagcaggtccaggctagggccgcagaatactttttgtcatgcaaagagcctgtccagggtatagagagccagccatggcccatgtcctatcaaatattctcctttttcggaaaaagctctaagcatttgcaaaacatctgtttgctccatatttttactatccaaaaaatgtatttcctcttcagtaaaaaacacaacaataggctgttaagcctgtaacattttaccataattctatgttttcaaaagctagaaatcatttgtattgccggataaggacattattttaagtagactttagtctacaacagaaacttgccgtaacaatgaaaatgttttttggcaaatccctttctgaacattatttctccacgaacgtatcacaaaaaccaccaccaaggaaaacaaaggattctcgtattttgaatcaaaaagtactggccatgcatattcatactatatcaagcatgtcaatcaaaatgggcaaaataacctaaaaagcagtaaaaatgccaactcttgcctctgagtggttagtgaacctatgttttcccaatatgaaatttacaaactgcatcggatcaactgtatttcatactttaaatctcgaatctctacctcccactgcttcgggatggatgatttactcaagacatttggggtcacagtgtaagccttttgctcccagtaaatctaaatcatgcttctcaacaagattctgcacatataaaaggaacacgtggcacgcctcgccatgctccccagaggaaactaaacgcccccagaatagcccttctgtccactccagaaacaggctttcctcaaaaagggaaaggggctggattcacacgttgcatcatatacactcacgaagcaacagcgctccaaaactttttctgactccattcattacaaaatgtcctggatgtgctttattatcacagagacagacatcctcacccaagggacacactcagaaacccaaactcaactcggcagcaaactgggagacacgagaagttgacagcaaagtatccatttccccaaatcctccttcttccagtcaatgtgcatcgatggggtcagctcagcccttaactcgaagaccccgggaccacaggggccaccacgcagctgagctctgcacagcccgggctgttcccgcgcccgggaggcgtctggggaggaggctggacggccagacaatgcaaagctccccggtggccgcgaactcagcctggggcgggggaggcgggggcgggagacggagccgtgagcgcccttctcggccacagccacggccacggtcaccggccgcctctcctgacctcggcctcggcccccaggtccccggtccccggggaaggggctccgggaaggcaggtttctcccggaaagaaaggaaacgcgctggtttgggcgccacgggcggggggcgtgcgccctcccctcccctcccctccccactgtgggaatccgcgggggtcggcggcggaggcaggaagggcctggcgcctctgctcgcgggtgaaggggtcgcggaaccgggatccccgagcgcagccgcccccacccgaggctcccagcgtgtgcggacggaggggctcgagccgggatcccgggggccgaggggggtccaactttccagggcgggcgcagcgcagcactcgaaccaaagaggggtcctgggatgagggtgcgggcacagcgcggaaggggggggggcagaggcggggacggcggggtggggggcggggagaggacagtgggtcggggggcgggggactgggggcaggggtcggggggtggagggcgggcagggggacaacggggttggcggagggcaggggtaacgggcgtggggggcgggcaggggtaacgggcgtggggggcgggcaggggccggcgaggcccgcgccgctcaccttcctgtgcttctccttgtagggcagcgccagccacggcatgtcccgcacgaagtcctgccactgccgctggtcctggtccgaggacacgaagacgatctccaggcgccgccgcggctcgggctccgccgccgccccggcccccgctcccggccccggcccggccgccgcgtccccccgcaggcgcccgtagaaggcggccaggctggcgctgagctgcgcgcagggggcgctgaggctgcagccgaagtagagacccagcagcgagatgccgcgggcgcccagcgagtgcacgtccacctcctcgccgccgcccgtcaccagcttctcgccgagcagctcctccaggaagcccgacatcctggcccaccgcagggcgggcaggcggctgcgaccccgctccacggtccgcgcggcgggaggaggcggcggcgtcggcggcaggcgctggggagagcagagcccggcccagtagggccgcccacgccacgccccctccgcctgcccgcgccacgccccttcccccgccctgccacgccccctccgcggcccgcgccacgccccttcggctgccctcgccacgcccctccgcccgccctcgccacgccccctccgccctcgccacgccccgtttgcggccggcggtggccagagctctccgcccaggcggggtccgcagctgccggccgcggtgcgcggggtgactgcttgggcgagaagccggacccgaaacgccgcactctccctggaaagcccacggccgaagtgaagaaaggagaagggcccgctgagccggcgctttcccgggctgcagcccggcccgcattttctctcctccccagttctaaattccctccagacctccagggatcccgccccctccccgcggagctcttcaccctcttcctgttcctccccggcctttccctcctcctctccctgcacgaagcctgacccttaggccgctccgggccccactgaccctgagatgcttataggacccgccgtcctcactgcatcaggccgggcctggctggacactgactcctctgtgtgttccaagctgttctaagggggccgaggacgccctcgcagcttctggtggggtctggttagggtgccaggtctcagtgtgggatttccgtccaggggtcgccggggcctctccccccagcgaatctgtcttccagccccacaaatggatgcaaaggacgccgcggggcctccagaccaatgctggccgcgctcctgaatccgctccatcctcatgtcaagtctatggatagttgagaacatttctagagattttttttttcctaccagctggcaggatgctccccaatgcttagggagaagctggattaaacaggtggtctgggccgggcgcggtggctcacgcctgaattcccagcactttgggaggccgaggtgggtggatcacaaggtcaggagttcgagaccagcctggccaatatggtgacaccccccccccgcctctactaaaaatacaaaaattagcggggtgtagtggcaggcacctgtaatccgagcaactcaggaggctgaggtaggagaatggcgtgaagccgggagacggaggctgcagtgagccgagatcgctccattgcactccagcctgggcaacagagcaagactccgtctcaaaaaaaacaaaaaaacaggtggtccgtggcgagtactctggccacgcagcgcctccccccaacccaacccactggtgcacgaagcaggtgcagatccgggcccagccacagtaacaggccgccggtgtggatcagctactgacgactcagcgaaagcaaaaaaataaaagctgaaaacccgcccctctcagagcttccaccgccgcttcggaggatatttcctgtgcatccatcgccacctaatggaaagagtgaaaaatgaggccgaccaaactc
